(19) United States
(12) Patent Application Publication
(10) Pub. No.: US 2026/0166085 A1
(43) Pub. Date: Jun. 18, 2026

(54) COMPOSITIONS AND METHODS FOR NON-GENOTOXIC CELL CONDITIONING

(71) Applicant: Beam Therapeutics Inc., Cambridge, MA (US)

(72) Inventors: Nicole Gaudelli, Cambridge, MA (US); Tanggis Bohnuud, Cambridge, MA (US); Scott Haihua Chu, Cambridge, MA (US); Kathy Ying Zhang, Cambridge, MA (US); Nandini Mondal, Cambridge, MA (US); Megan Egbert, Cambridge, MA (US); Adam Hartigan, Cambridge, MA (US); Charlotte McDonagh, Cambridge, MA (US)

(73) Assignee: Beam Therapeutics Inc., Cambridge, MA (US)

(21) Appl. No.: 18/984,508

(22) Filed: Dec. 17, 2024

Related U.S. Application Data
(63) Continuation of application No. PCT/US2023/069189, filed on Jun. 27, 2023.
(60) Provisional application No. 63/355,927, filed on Jun. 27, 2022.
(60) Provisional application No. 63/386,719, filed on Dec. 9, 2022.
(60) Provisional application No. 63/478,744, filed on Jan. 6, 2023.
(60) Provisional application No. 63/500,854, filed on May 8, 2023.

(51) Int. Cl. A61K 35/28; A61K 39/00; A61P 37/06; C07K 16/28; C12N 5/0789; C12N 9/22; C12N 9/78; C12N 15/11

(52) U.S. Cl. CPC A61K 35/28; A61P 37/06; C07K 16/2803; C12N 5/0647; C12N 9/22; C12N 9/78; C12N 15/111; A61K 2039/505; C07K 2317/565; C07K 2317/92; C07K 2317/94; C12N 2310/20; C12N 2510/00; C12Y 305/04004

(57) ABSTRACT

Compositions and methods for non-genotoxic monoclonal antibody (mAb) conditioning, where the methods involve altering a cluster of differentiation 117 (CD117; c-KIT) polynucleotide sequence in a hematopoietic stem cell (HSC) or progenitor thereof to encode a CD117 polypeptide with reduced binding to the antibody. In various embodiments, the methods further include introducing a therapeutic alteration to a gene of the HSC or progenitor thereof for treatment of a hemoglobinopathy.

### CROSS REFERENCE TO RELATED APPLICATIONS

[0001] This application is a continuation under 35 U.S.C. § 111 (a) of PCT International Patent Application No. PCT/US2023/069189, filed Jun. 27, 2023, which claims priority to and the benefit of U.S. Provisional Application No. 63/500,854, filed May 8, 2023, U.S. Provisional Application No. 63/478,744, filed Jan. 6, 2023, U.S. Provisional Application No. 63/386,719, filed Dec. 9, 2022, and U.S. Provisional Application No. 63/355,927, filed Jun. 27, 2022, the entire contents of each of which are incorporated by reference herein.

### SEQUENCE LISTING

[0002] This application contains a Sequence Listing which has been submitted electronically in XML format and is hereby incorporated by reference in its entirety. The Sequence Listing XML file, created on Jun. 26, 2023, is named 180802-046405PCT_SL.xml and is 1,559,644 bytes in size.

### BACKGROUND

[0003] Busulfan is a DNA alkylating reagent that induces bone marrow immunosuppression and is widely used for conditioning prior to allogenic hematopoietic stem cell transplantation and administration of autologous cell therapies. Notably, a prerequisite for ex vivo treatment of sickle cell disease (SCD), the most common single gene inherited hemoglobinopathy, is conditioning of the patient prior to infusion of an autologous cell therapy. While busulfan is the current standard of care for patients in need of allogenic or autologous transplants and engraftment of cell therapies, the use of this potent cytotoxic agent has associated risks including genotoxicity, primary or secondary malignancy, and organ toxicities including infertility. These risks present barriers to patients who would otherwise seek treatment. Accordingly, there is a need for improved methods for conditioning prior to allogeneic hematopoietic stem cell transplantation.

### SUMMARY

[0004] As described below, the present disclosure features compositions and methods for non-genotoxic monoclonal antibody (mAb) conditioning, where the methods involve altering a cluster of differentiation 117 (CD117; c-KIT) polynucleotide sequence in a hematopoietic stem cell (HSC) or progenitor thereof to encode a CD117 polypeptide with reduced binding to the antibody. In various embodiments, the methods further include introducing a therapeutic alteration to a gene of the HSC or progenitor thereof for treatment of a hemoglobinopathy (e.g., sickle cell disease).

[0005] In one aspect, the disclosure features a method of altering a nucleobase of a CD117 polynucleotide. The method involves, contacting the CD117 polynucleotide with a base editor polypeptide containing a nucleic acid programmable DNA binding protein (napDNAbp) and an adenosine deaminase domain, and a guide polynucleotide that targets the base editor to i) effect an alteration of a nucleobase in a codon encoding a serine at amino acid position 261, where the alteration of the nucleobase encoding the serine at amino acid position 261 results in the codon expressing a glycine, ii) effect an alteration of a nucleobase in a codon encoding a serine at amino acid position 251, and/or iii) effect an alteration of a nucleobase in a codon encoding an asparagine at amino acid position 260 and effect an alteration of a nucleobase in a codon encoding a serine at amino acid position 261, or corresponding positions in another CD117 polypeptide, thereby altering the nucleobase of the CD117 polynucleotide.

[0006] In another aspect, the disclosure features a method of altering a nucleobase of a CD117 polynucleotide, the method involves contacting the CD117 polynucleotide with a base editor polypeptide containing a nucleic acid programmable DNA binding protein (napDNAbp) domain and an adenosine deaminase domain. The adenosine deaminase domain contains a combination of alterations to TadA*7.10 selected from: a) I76Y, V82T, Y123H, Y147R, F149Y, and Q154R; and b) I76Y, V82T, Y123H, Y147D, F149Y, Q154R, T166I, and D167N. The adenosine deaminase domain has at least 85% sequence identity to TadA*7.10. The method also involves contacting the CD117 polynucleotide with a guide polynucleotide that targets the base editor to effect an alteration of a nucleobase in a polynucleotide encoding a CD117 polypeptide, thereby altering the nucleobase of the CD117 polynucleotide.

[0007] In another aspect, the disclosure features a method for hematopoietic stem cell transplantation in a subject. The method involves (a) contacting an isolated hematopoietic stem cell or progenitor thereof with a guide polynucleotide and a base editor containing a nucleic acid programmable DNA binding protein (napDNAbp) and an adenosine deaminase domain or a polynucleotide encoding the base editor, where the guide polynucleotide targets a nucleic acid molecule encoding a CD117 polypeptide. (a) results in the generation of an edited cell. The method also involves (b) administering the edited cell to the subject. The method also involves (c) administering to the subject an antibody or antigen binding fragment thereof, where the antibody is selected from one or more of ABTx025, ABTx030, ABTx052, ABTx061, ABTx062, ABTx070, ABTx071, ABTx196, ABTx198, ABTx202, ABTx203, ABTx205, ABTx206, ABTx248, ABTx250, ABTx251, ABTx253, ABTx254, ABTx255, ABTx256, ABTx265, ABTx268, ABTx270, ABTx271, ABTx272, ABTx273, ABTx274, ABTx307, ABTx308, ABTx309, and ABTx313.

[0008] In another aspect, the disclosure features a method for hematopoietic stem cell transplantation in a subject. The method involves (a) contacting an isolated hematopoietic stem cell or progenitor thereof with a guide polynucleotide and a base editor containing a nucleic acid programmable DNA binding protein (napDNAbp) and an adenosine deaminase domain or a polynucleotide encoding the base editor. The guide polynucleotide targets a nucleic acid molecule encoding a CD117 polypeptide, thereby i) introducing an alteration of a nucleobase in a codon encoding a serine at amino acid position 261, where the alteration of the nucleobase encoding the serine at amino acid position 261 results in the codon expressing a glycine, ii) introducing an alteration of a nucleobase in a codon encoding a serine at amino acid position 251, and/or iii) introducing an alteration of a nucleobase in a codon encoding an asparagine at amino acid position 260 and introducing an alteration of a nucleobase in a codon encoding a serine at amino acid position 261, or corresponding positions in another CD117 polypeptide. (a) results in generating an edited cell. The method also involves (b) administering the edited cell to the subject. The method also involves (c) administering to the subject an antibody or antigen binding fragment thereof, antibody drug conjugate, or a chimeric antigen receptor T (CAR-T) cell, each of which selectively binds a wild type CD117 polypeptide.

[0009] In another aspect, the disclosure features a method for hematopoietic stem cell transplantation in a subject. The method involves (a) contacting an isolated hematopoietic stem cell or progenitor thereof with a guide polynucleotide and a base editor containing a nucleic acid programmable DNA binding protein (napDNAbp) and an adenosine deaminase domain or a polynucleotide encoding the base editor. The adenosine deaminase domain contains a combination of alterations to TadA*7.10 selected from: i) I76Y, V82T, Y123H, Y147R, F149Y, and Q154R; and ii) I76Y, V82T, Y123H, Y147D, F149Y, Q154R, T166I, and D167N. The adenosine deaminase domain has at least 85% sequence identity to TadA*7.10. The guide polynucleotide targets a nucleic acid molecule encoding a CD117 polypeptide. (a) results in generating an edited cell. The method also involves (b) administering the edited cell to the subject. The method also involves (c) administering to the subject an antibody or antigen binding fragment thereof, antibody drug conjugate, or a chimeric antigen receptor T (CAR-T) cell, each of which selectively binds a wild type CD117 polypeptide.

[0010] In another aspect, the disclosure features a method for treating a hemoglobinopathy in a subject. The method involves (a) contacting an isolated hematopoietic stem cell or progenitor thereof with two or more guide polynucleotides and a base editor containing a nucleic acid programmable DNA binding protein (napDNAbp) and an adenosine deaminase domain or a polynucleotide encoding the base editor. One guide polynucleotide targets a nucleic acid molecule encoding a CD117 polypeptide and another guide polynucleotide targets the base editor to effect a deamination of a nucleobase of a hemoglobin subunit gamma 1 and/or 2 (HBG1/2) promoter. (a) results in generating an edited cell. The method also involves (b) administering the edited cell to the subject. The method also involves (c) administering to the subject an antibody or antigen binding fragment thereof, where the antibody is selected from one or more of ABTx025, ABTx030, ABTx052, ABTx061, ABTx062, ABTx070, ABTx071, ABTx196, ABTx198, ABTx202, ABTx203, ABTx205, ABTx206, ABTx248, ABTx250, ABTx251, ABTx253, ABTx254, ABTx255, ABTx256, ABTx265, ABTx268, ABTx270, ABTx271, ABTx272, ABTx273, ABTx274, ABTx307, ABTx308, ABTx309, and ABTx313.

[0011] In another aspect, the disclosure features a method for treating a hemoglobinopathy in a subject. The method involves (a) contacting an isolated hematopoietic stem cell or progenitor thereof with two or more guide polynucleotides and a base editor containing a nucleic acid programmable DNA binding protein (napDNAbp) and an adenosine deaminase domain or a polynucleotide encoding the base editor. One guide polynucleotide targets a nucleic acid molecule encoding a CD117 polypeptide, thereby i) introducing an alteration of a nucleobase in a codon encoding a serine at amino acid position 261, where the alteration of the nucleobase encoding the serine at amino acid position 261 results in the codon expressing a glycine, ii) introducing an alteration of a nucleobase in a codon encoding a serine at amino acid position 251, and/or iii) introducing an alteration of a nucleobase in a codon encoding an asparagine at amino acid position 260 and introducing an alteration of a nucleobase in a codon encoding a serine at amino acid position 261, or corresponding positions in another CD117 polypeptide. Another guide polynucleotide targets the base editor to effect an alteration to a beta globin polynucleotide (HBB) that results in expression of a beta globin polypeptide having an alanine at position 6 (Hb G-Makassar). (a) also results in generating an edited cell. The method also involves (b) administering the edited cell to the subject. The method further involves (c) administering to the subject an antibody or antigen binding fragment thereof, antibody drug conjugate, or a chimeric antigen receptor T (CAR-T) cell, each of which selectively binds a wild type CD117 polypeptide.

[0012] In another aspect, the disclosure features a method for treating a hemoglobinopathy in a subject. The method involves (a) contacting an isolated hematopoietic stem cell or progenitor thereof with two or more guide polynucleotides and a base editor containing a nucleic acid programmable DNA binding protein (napDNAbp) and an adenosine deaminase domain or a polynucleotide encoding the base editor. The adenosine deaminase domain contains a combination of alterations to TadA*7.10 selected from: i) 176Y, V82T, Y123H, Y147R, F149Y, and Q154R; and ii) I76Y, V82T, Y123H, Y147D, F149Y, Q154R, T166I, and D167N. The adenosine deaminase domain has at least 85% sequence identity to TadA*7.10. One guide polynucleotide targets a nucleic acid molecule encoding a CD117 polypeptide, and another guide polynucleotide targets the base editor to effect an alteration to a beta globin polynucleotide (HBB) that results in expression of a beta globin polypeptide having an alanine at position 6 (Hb G-Makassar). (a) results in generating an edited cell. The method also involves (b) administering the edited cell to the subject. The method also involves (c) administering to the subject an antibody or antigen binding fragment thereof, antibody drug conjugate, or a chimeric antigen receptor T (CAR-T) cell, each of which selectively binds a wild type CD117 polypeptide.

[0013] In another aspect, the disclosure features a cell produced by the method of any of the above aspects, or embodiments thereof.

[0014] In another aspect, the disclosure features a pharmaceutical composition containing an effective amount of the cell of any of the above aspects, or embodiments thereof.

[0015] In another aspect, the disclosure features a base editor system containing a base editor containing a nucleic acid programmable DNA binding protein (napDNAbp) and an adenosine deaminase domain or a polynucleotide encoding the base editor, and a guide polynucleotide that targets the base editor to i) effect an alteration of a nucleobase in a codon encoding a serine at amino acid position 261, where the alteration of the nucleobase encoding the serine at amino acid position 261 results in the codon expressing a glycine, ii) effect an alteration of a nucleobase in a codon encoding a serine at amino acid position 251, and/or iii) effect an alteration of a nucleobase in a codon encoding an asparagine at amino acid position 260 and effect an alteration of a nucleobase in a codon encoding a serine at amino acid position 261, or corresponding positions in another CD117 polypeptide, thereby altering the nucleobase of the CD117 polynucleotide.

[0016] In another aspect, the disclosure features a base editor system containing a guide polynucleotide and a base editor containing a nucleic acid programmable DNA binding protein (napDNAbp) domain and an adenosine deaminase domain. The adenosine deaminase domain contains a combination of alterations to TadA*7.10. The combinations are selected from: a) I76Y, V82T, Y123H, Y147R, F149Y, and Q154R; and b) I76Y, V82T, Y123H, Y147D, F149Y, Q154R, T166I, and D167N. The guide polynucleotide targets the base editor to effect an alteration of a nucleobase of a CD117 polynucleotide. The adenosine deaminase domain has at least 85% sequence identity to TadA*7.10.

[0017] In another aspect, the disclosure features a base editor system containing a base editor containing a nucleic acid programmable DNA binding protein (napDNAbp) and an adenosine deaminase domain, and a guide polynucleotide containing a polynucleotide sequence selected from one or more of: AUAAUAGCUGGCAUCACGGU (SEQ ID NO: 693; gRNA931); CCACUAGCUUUCCAAACGGU (SEQ ID NO: 694; gRNA889); GCUGAACUGAUAGUCAACGU (SEQ ID NO: 695; gRNA908); UUUGACAAAGCCCGGAUCAG (SEQ ID NO: 696; gRNA918); UGAAAGUGAGGCCAGGUACU (SEQ ID NO: 697; gRNA923); AAACAGUCAGGUGAGUGAAU (SEQ ID NO: 698; gRNA928); AACUACAGGAGAAAUAUAAU (SEQ ID NO: 699; gRNA929); and GAUUAAAAGGCACCGAAGGA (SEQ ID NO: 700; gRNA944).

[0018] In another aspect, the disclosure features a polynucleotide encoding the base editor system of any of the above aspects, or embodiments thereof.

[0019] In another aspect, the disclosure features a guide polynucleotide containing a spacer sequence selected from one or more of: AUAAUAGCUGGCAUCACGGU (SEQ ID NO: 693; gRNA931); CCACUAGCUUUCCAAACGGU (SEQ ID NO: 694; gRNA889); GCUGAACUGAUAGUCAACGU (SEQ ID NO: 695; gRNA908); UUUGACAAAGCCCGGAUCAG (SEQ ID NO: 696; gRNA918); UGAAAGUGAGGCCAGGUACU (SEQ ID NO: 697; gRNA923); AAACAGUCAGGUGAGUGAAU (SEQ ID NO: 698; gRNA928); AACUACAGGAGAAAUAUAAU (SEQ ID NO: 699; gRNA929); and GAUUAAAAGGCACCGAAGGA (SEQ ID NO: 700; gRNA944).

[0020] In another aspect, the disclosure features a kit containing the cell, base editor system, polynucleotide, or pharmaceutical composition of any of the above aspects, or embodiments thereof.

[0021] In another aspect, the disclosure features an anti-CD117 antibody or antigen-binding portion thereof containing one or more complementarity determining regions (CDRs) which contain heavy chain variable region (VH) CDRs and/or light chain variable region (VL) CDRs selected from the following: A) VL CDR1: QSVSSSY (SEQ ID NO: 394); VL CDR2: GAS; VL CDR3: QQYGTSLT (SEQ ID NO: 395); VH CDR1: GFTFDDYA (SEQ ID NO: 391); VH CDR2: ISWNSGTI (SEQ ID NO: 392); VH CDR3: AKDSPPGYCSSASCYGAFDI (SEQ ID NO: 393) (ABTx025); B) VL CDR1: QSISSY (SEQ ID NO: 409); VL CDR2: AAS; VL CDR3: QQSYSTPLT (SEQ ID NO: 410); VH CDR1: GFTFSSYS (SEQ ID NO: 406); VH CDR2: IGTISSYI (SEQ ID NO: 407); VH CDR3: ARDYYGGLFDY (SEQ ID NO: 408) (ABTx030); C) VL CDR1: QSVSSSY (SEQ ID NO: 439); VL CDR2: GAS; VL CDR3: QQYGSSPLT (SEQ ID NO: 440); VH CDR1: GFTFDDYA (SEQ ID NO: 436); VH CDR2: ISWNSGSI (SEQ ID NO: 437); VH CDR3: AKDTPLGYCSTTSCYGAFDI (SEQ ID NO: 438) (ABTx061); D) VL CDR1: QSISSY (SEQ ID NO: 454); VL CDR2: AAS; VL CDR3: QQSYSTPFT (SEQ ID NO: 455); VH CDR1: GFTFDDYA (SEQ ID NO: 451); VH CDR2: ISWNSGTI (SEQ ID NO: 452); VH CDR3: AKDSPPGYCSSASCYGAFDI (SEQ ID NO: 453) (ABTx062); E) VL CDR1: QGISSY (SEQ ID NO: 469); VL CDR2: AAS; VL CDR3: QQSYSTPIT (SEQ ID NO: 470); VH CDR1: GFTEDDYG (SEQ ID NO: 466); VH CDR2: INWNGGST (SEQ ID NO: 467); VH CDR3: ARESWDGSGIYYMDV (SEQ ID NO: 468) (ABTx070); F) VL CDR1: QGISSY (SEQ ID NO: 484); VL CDR2: AAS; VL CDR3: QQLNSYPYT (SEQ ID NO: 485); VH CDR1: GFTEDDYG (SEQ ID NO: 481); VH CDR2: INWNGGST (SEQ ID NO: 482); VH CDR3: ARESWNYEGYYYMDV (SEQ ID NO: 483) (ABTx071); G) VL CDR1: QGISSA (SEQ ID NO: 424); VL CDR2: DAS; VL CDR3: QQFNSYPLT (SEQ ID NO: 425); VH CDR1: GYRFTSYW (SEQ ID NO: 421); VH CDR2: IYPGDSDTR (SEQ ID NO: 958); VH CDR3: ARHGRGYDGYDGAFDI (SEQ ID NO: 1012); H) VL CDR1: QGISSA (SEQ ID NO: 424); VL CDR2: DAS; VL CDR3: QQFNSYPLT (SEQ ID NO: 425); VH CDR1: GYRFTSYW (SEQ ID NO: 421); VH CDR2: IYPGDSDTK (SEQ ID NO: 972); VH CDR3: ARHGRGYDGYEGAFDI (SEQ ID NO: 948); I) VL CDR1: QGISSA (SEQ ID NO: 424); VL CDR2: DAS; VL CDR3: QQFYSYPLT (SEQ ID NO: 954); VH CDR1: GYRFTSYW (SEQ ID NO: 421); VH CDR2: TYPGDSDTR (SEQ ID NO: 958); VH CDR3: ARHGRGYDGYEGAFDI (SEQ ID NO: 948); J) VL CDR1: QGISSA (SEQ ID NO: 424); VL CDR2: DAS; VL CDR3: QQFSSYPLT (SEQ ID NO: 1020); VH CDR1: GYRFTSYW (SEQ ID NO: 421); VH CDR2: IYPGDSDTR (SEQ ID NO: 958); VH CDR3: ARHGRGYDGYEGAFDI (SEQ ID NO: 948); K) VL CDR1: QGISSA (SEQ ID NO: 424); VL CDR2: DAS; VL CDR3: QQTNSHPLT (SEQ ID NO: 1023); VH CDR1: GYRFTSYW (SEQ ID NO: 421); VH CDR2: IYPGDSDTK (SEQ ID NO: 972); VH CDR3: ARHGRGYDGYDGAFDI (SEQ ID NO: 1012); L) VL CDR1: QGISSA (SEQ ID NO: 424); VL CDR2: DAS; VL CDR3: QQVRSYPLT (SEQ ID NO: 1025); VH CDR1: GYRFTSYW (SEQ ID NO: 421); VH CDR2: IYPGDSDTK (SEQ ID NO: 972); VH CDR3: ARHGRGYDGYEGAFDI (SEQ ID NO: 948); M) VL CDR1: QGISSA (SEQ ID NO: 424); VL CDR2: DAS; VL CDR3: QQTYSYPLT (SEQ ID NO: 1029); VH CDR1: GYRFTSYW (SEQ ID NO: 421); VH CDR2: IYPGDSDTR (SEQ ID NO: 958); VH CDR3: ARHGRGYDAYEGAFDI (SEQ ID NO: 1027); N) VL CDR1: QGISSA (SEQ ID NO: 424); VL CDR2: DAS; VL CDR3: QQTRSYPLT (SEQ ID NO: 1036); VH CDR1: GYRFTSYW (SEQ ID NO: 421); VH CDR2: TYPGDSDTK (SEQ ID NO: 972); VH CDR3: ARHGRGYDGYDGAFDI (SEQ ID NO: 1012); O) VL CDR1: QGISSA (SEQ ID NO: 424); VL CDR2: DAS; VL CDR3: QQVNSYPLT (SEQ ID NO: 952); VH CDR1: GYRFTSYW (SEQ ID NO: 421); VH CDR2: TYPGDSDTK (SEQ ID NO: 972); VH CDR3: ARHGRGYDGYEGAFDI (SEQ ID NO: 948); P) VL CDR1: QGISSA (SEQ ID NO: 424); VL CDR2: DAS; VL CDR3: QQVRSYPLT (SEQ ID NO: 1025); VH CDR1: GYRFTSYW (SEQ ID NO: 421); VH CDR2: IYPGDSDTR (SEQ ID NO: 958); VH CDR3: ARHGRGYDAYEGAFDI (SEQ ID NO: 1027); Q) VL CDR1: QGISSA (SEQ ID NO: 424); VL CDR2: DAS; VL CDR3: QQTNSYPLT (SEQ ID NO: 1044); VH CDR1: GYRFTSYW (SEQ ID NO: 421); VH CDR2: IYPGDSDTR (SEQ ID NO: 958); VH CDR3: ARHGRGYDAYDGAFDI (SEQ ID NO: 1032); R) VL CDR1: QGISSA (SEQ ID NO: 424); VL CDR2: DAS; VL CDR3: QQVRSYPLT (SEQ ID NO: 1025); VH CDR1: GYRFTSYW (SEQ ID NO: 421); VH CDR2: TYPGDSDTK (SEQ ID NO: 972); VH CDR3: ARHGRGYDGYDGAFDI (SEQ ID NO: 1012); S) VL CDR1: QGISSA (SEQ ID NO: 424); VL CDR2: DAS; VL CDR3: QQFRSYPLT (SEQ ID NO: 953); VH CDR1: GYRFTSYW (SEQ ID NO: 421); VH CDR2: TYPGDSDTR (SEQ ID NO: 958); VH CDR3: ARHGRGYDGYEGAFDI (SEQ ID NO: 948); T) VL CDR1: QGISSA (SEQ ID NO: 424); VL CDR2: DAS; VL CDR3: QQTNSYPLT (SEQ ID NO: 1044); VH CDR1: GYRFTSYW (SEQ ID NO: 421); VH CDR2: IYPGDSDTK (SEQ ID NO: 972); VH CDR3: ARHGRGYDGYEGAFDI (SEQ ID NO: 948); U) VL CDR1: QSVSSSY (SEQ ID NO: 394); VL CDR2: GAS; VL CDR3: QQSETCLT (SEQ ID NO: 1074); VH CDR1: GFTEDDYA (SEQ ID NO: 391) VH CDR2: ISWNSGTIG (SEQ ID NO: 1070); VH CDR3: AKDSPPGYCSSASCYGAFDI (SEQ ID NO: 393); V) VL CDR1: QSVSSSY (SEQ ID NO: 394); VL CDR2: GAS; VL CDR3: QQDSLGLT (SEQ ID NO: 1074); VH CDR1: GFTFDDYA (SEQ ID NO: 391); VH CDR2: ISWNSGTIG (SEQ ID NO: 1070); VH CDR3: AKDSPPGYCASASCYGAFDI (SEQ ID NO: 1090); W) VL CDR1: QSVSSSY (SEQ ID NO: 394); VL CDR2: GSS; VL CDR3: QQYNFWPYT (SEQ ID NO: 1084); VH CDR1: GFTFDDYA (SEQ ID NO: 391); VH CDR2: ISWNSGTIG (SEQ ID NO: 1070); VH CDR3: AKDSPPGYCSSASCYGAFDI (SEQ ID NO: 393); X) VL CDR1: QGISSY (SEQ ID NO: 469); VL CDR2: AAS; VL CDR3: QQSYSTPYT (SEQ ID NO: 1097); VH CDR1: GFTFDDYA (SEQ ID NO: 391); VH CDR2: ISWNSGTIG (SEQ ID NO: 1070); VH CDR3: AKDWPSGFCSSAYCYGAFDI (SEQ ID NO: 1094); Y) VL CDR1: QGISSY (SEQ ID NO: 469); VL CDR2: AAS; VL CDR3: QQSYSTPYT (SEQ ID NO: 1097); VH CDR1: GFTFDDYA (SEQ ID NO: 1071); VH CDR2: ISWNSGTIG (SEQ ID NO: 1070); VH CDR3: AKDSPPGYCSSASCYGAFDI (SEQ ID NO: 393); Z) VL CDR1: QGISSA (SEQ ID NO: 424); VL CDR2: DAS; VL CDR3: QQFNSYPLT (SEQ ID NO: 425); VH CDR1: GYRFTSYW (SEQ ID NO: 421); VH CDR2: TYPGDSDTR (SEQ ID NO: 958); VH CDR3: ARHGRGYDGYDGAFDI (SEQ ID NO: 1012); AA) VL CDR1: QGISSA (SEQ ID NO: 424); VL CDR2: DAS; VL CDR3: QQFSSYPLT (SEQ ID NO: 1020); VH CDR1: GYRFTSYW (SEQ ID NO: 421); VH CDR2: IYPGDSDTK (SEQ ID NO: 972); VH CDR3: ARHGRGYDAYDGAFDI (SEQ ID NO: 1032); AB) VL CDR1: QGISSA (SEQ ID NO: 424); VL CDR2: DAS; VL CDR3: QQTNSYPLT (SEQ ID NO: 1044); VH CDR1: GYRFTSYW (SEQ ID NO: 421); VH CDR2: IYPGDSDTR (SEQ ID NO: 958); VH CDR3: ARHGRGYDAYDGAFDI (SEQ ID NO: 1032); and AC) VL CDR1: QGISSA (SEQ ID NO: 424); VL CDR2: DAS; VL CDR3: QQFSSYPLT (SEQ ID NO: 425); VH CDR1: GYRFTSYW (SEQ ID NO: 421); VH CDR2: IYPGDSDTR (SEQ ID NO: 958); VH CDR3: ARHGRGYDGYDGAFDI (SEQ ID NO: 1012).

[0022] In another aspect, the disclosure features an isolated nucleic acid molecule that encodes the antibody of any one of any of the above aspects, or embodiments thereof.

[0023] In another aspect, the disclosure features an anti-CD117 antibody or antigen-binding portion thereof containing complementarity determining regions (CDRs) that contain the following heavy chain variable region (VH) CDR and light chain variable region (VL) CDR amino acid sequences: VH CDR1: GYRFTSYW (SEQ ID NO: 421); VH CDR2 is IYPGDSDTR (SEQ ID NO: 958) or TYPGDSDTK (SEQ ID NO: 972); VH CDR3: ARHGRGYXYXGAFDI (SEQ ID NO: 944); VL CDR1: QGISSA (SEQ ID NO: 424); VL CDR2: DAS; and VL CDR3 selected from one or more of QQXSYPLT (SEQ ID NO: 945), QQXSHPLT (SEQ ID NO: 946), and QQXSSPLT (SEQ ID NO: 947). X indicates any amino acid. The anti-CD117 antibody contains at least one amino acid alteration relative to the amino acid sequence of ABTx052.

[0024] In another aspect, the disclosure features An anti-CD117 antibody or antigen-binding portion thereof containing complementarity determining regions (CDRs) that contain or contain only the following heavy chain variable region (VH) CDR and light chain variable region (VL) CDR amino acid sequences:
[0025] VH CDR1: GX₁X₂FX₃X₄YX₅, where X₁ is F or Y, X₂ is R or T, X₃ is D, S, or T, X₄ is D or S, and X₅ is A, G, S, or W;
[0026] VH CDR2 is IX₆X₇X₈X₉X₁₀X₁₁X₁₂X₁₃, where X₆ is G, N, S, or Y, X₇ is P, T, or W, X₈ is G, I, or N, X₉ is D, G, or S, X₁₀ is G or S, X₁₁ is D, S, T, or Y, X₁₂ is I or T, and X₁₃ is G, K, R, or Y; VH CDR3 is selected from one or more of ARHGRGYDX₁₄ YDGAFDI (SEQ ID NO: 1105), ARDYYGGLFDY (SEQ ID NO: 1106), ARESWX₁₅X₁₆X₁₇GX₁₈ YYMDV (SEQ ID NO: 1107), and AKDX₁₉PX₂₀GX₂₁CX₂₂X₂₃X₂₄X₂₅CYGAFDI (SEQ ID NO: 1108), where X₁₄ is A or G, X₁₅ is D or N, X₁₆ is G or Y, X₁₇ is E or S, X₁₈ is I or Y, X₁₉ is S, T, or W, X₂₀ is L, P, or S, X₂₁ is F or Y, X₂₂ is A or S, X₂₃ is S or T, X₂₄ is A or T, and X₂₅ is S or Y;
[0027] VL CDR1 is QSX₂₆SSX₂₇ (SEQ ID NO: 1109) or QSVSSSY (SEQ ID NO: 1110), where X₂₆ is G or S, and X₂₇ is A or Y;
[0028] VL CDR2: X₂₈X₂₉S, where X₂₈ is A, D, or G, and X₂₉ is A or S; and
[0029] VL CDR3 is QQX₃₀X₃₁X₃₂X₃₃ PX₃₄T (SEQ ID NO: 1111) or QQX₃₅X₃₆X₃₇X₃₈LT (SEQ ID NO: 1112), where X₃₀ is F, L, S, T, or Y, X₃₁ G, N, S, or Y, X₃₂ is S or F, X₃₃ S, T, W, or Y, X₃₄ F, I, L, or Y, X₃₅ is D, S, or Y, X₃₆ is E, G, or S, X₃₇ is L or T, and X₃₈ is C, G, or S. The anti-CD117 antibody contains at least one amino acid alteration relative to the amino acid sequence of ABTx052.

[0030] In another aspect, the disclosure features a method for hematopoietic stem cell transplantation in a subject. The method involves (a) administering a hematopoietic stem cell or progenitor thereof to the subject. The hematopoietic stem cell or progenitor thereof expresses a CD117 variant containing an S261G amino acid alteration, or a CD117 variant containing Y259C and N260D amino acid alterations. The method further involves (b) administering to the subject an antibody or antigen binding fragment thereof that selectively binds a wild type CD117 polypeptide.

[0031] In another aspect, the disclosure features a method for treating a hemoglobinopathy in a subject. The method involves (a) administering a hematopoietic stem cell or progenitor thereof to the subject. The hematopoietic stem cell or progenitor thereof: i) either expresses a CD117 variant containing an S261G amino acid alteration or a CD117 variant containing Y259C and N260D amino acid alterations, and ii) contains a nucleobase alteration to the HBG1/2 promoter that effects an increase in gamma globin expression and/or expresses an HBB polypeptide containing an alanine at position 6. The method further involves, (b) administering to the subject an antibody or antigen binding fragment thereof that selectively binds a wild type CD117 polypeptide.

[0032] In another aspect, the disclosure features a hematopoietic stem cell or progenitor thereof expressing i) an S261G alteration, ii) alterations at amino acid positions 260 and 261, and/or ii) an alteration at amino acid position 251 relative to the following amino acid sequence, where the CD117 polypeptide has at least 85% sequence identity to the following amino acid sequence:

Wild Type CD117
(SEQ ID NO: 499)
[sequence omitted]

[0033] In another aspect, the disclosure features a hematopoietic stem cell or progenitor thereof expressing a CD117 polypeptide containing a sequence containing 10, 20, 30, or 40 consecutive amino acids. The sequence of consecutive amino acids contains amino acid position 260, amino acid positions 261, and/or amino acid position 251 relative to the following wild type CD117 amino acid sequence. Also, i) an amino acid corresponding to amino acid position 261 is substituted with a glycine, ii) the amino acids corresponding to amino acid positions 260 and 261 are altered, and/or
[0034] iii) an amino acid corresponding to amino acid position 251 is altered relative to the following wild type CD117 amino acid sequence in the sequence of consecutive amino acids. The sequence of consecutive amino acids has at least 85% sequence identity to a fragment of the following wild type CD117 amino acid sequence that has the same length as the sequence of consecutive amino acids.
[0035] Wild Type CD117 amino acid sequence MRGARGAWDFLCVLLLLLRVQTGSSQPSVSPGEPSPPSIHPGKSDLIVRVGDEIRLLCTDPGFV KWTFEILDETNENKQNEWITEKAEATNTGKYTCTNKHGLSNSIYVFVRDPAKLFLVDRSLYGKE DNDTLVRCPLTDPEVTNYSLKGCQGKPLPKDLRFIPDPKAGIMIKSVKRAYHRLCLHCSVDQEG KSVLSEKFILKVRPAFKAVPVVSVSKASYLLREGEEFTVTCTIKDVSSSVYSTWKRENSQTKLQ EKYNSWHHGDFNYERQATLTISSARVNDSGVFMCYANNTFGSANVTTTLEVVDKGFINIFPMIN TTVFVNDGENVDLIVEYEAFPKPEHQQWI YMNRTFTDKWEDYPKSENESNIRYVSELHLTRLKG TEGGTYTFLVSNSDVNAAIAFNVYVNTKPEILTYDRLVNGMLQCVAAGFPEPTIDWYFCPGTEQ RCSASVLPVDVQTLNSSGPPFGKLVVQSSIDSSAFKHNGTVECKAYNDVGKTSAYFNFAFKGNN KEQIHPHTLFTPLLIGFVIVAGMMCIIVMILTYKYLQKPMYEVQWKVVEEINGNNYVYIDPTQL PYDHKWE FPRNRLSFGKTLGAGAFGKVVEATAYGLIKSDAAMTVAVKMLKPSAHLTEREALMSE LKVLSYLGNHMNIVNLLGACTIGGPTLVITEYCCYGDLLNFLRRKRDSFICSKQEDHAEAALYK NLLHSKESSCSDSTNEYMDMKPGVSYVVPTKADKRRSVRIGSYIERDVTPAIMEDDELALDLED LLSFSYQVAKGMAFLASKNCIHRDLAARNILLTHGRITKICDFGLARDI KNDSNYVVKGNARLP VKWMAPESI FNCVYTFESDVWSYGIFLWELFSLGSSPYPGMPVDSKFYKMI KEGFRMLSPEHAP AEMYDIMKTCWDADPLKRPTFKQIVQLIEKQISESTNHIYSNLANCSPNRQKPVVDHSVRINSV GSTASSSQPLLVHDDV (SEQ ID NO: 499). The CD117 polypeptide is capable of binding a stem cell factor (SCF) polypeptide.

[0036] In any aspect of the disclosure, or embodiments thereof, the adenosine deaminase is TadA*8.1, TadA*8.2, TadA*8.3, TadA*8.4, TadA*8.5, TadA*8.6, TadA*8.7, TadA*8.8, TadA*8.9, TadA*8.10, TadA*8.11, TadA*8.12, TadA*8.13, TadA*8.14, TadA*8.15, TadA*8.16, TadA*8.17, TadA*8.18, TadA*8.19, TadA*8.20, TadA*8.21, TadA*8.22, TadA*8.23, or TadA*8.24. In any aspect of the disclosure, or embodiments thereof, the adenosine deaminase domain contains a set of alterations to TadA*7.10: MSEVEFSHEYWMRHALTLAKRARDEREVPVGAVLVLNNRVIGEGWNRAIGLHDPTAHAEIMALR QGGLVMQNYRLIDATLYVTFEPCVMCAGAMIHSRIGRVVFGVRNAKTGAAGSLMDVLHYPGMNH RVEITEGILADECAALLCYFFRMPRQVFNAQKKAQSSTD (SEQ ID NO: 1). The alterations are selected from the following: a) I76Y, V82T, Y123H, Y147R, F149Y, and Q154R (ABE9v1); b) I76Y, V82T, Y123H, Y147D, F149Y, Q154R, T166I, and D167N (ABE9v1); and c) I76Y, V82S, Y123H, Y147D, F149Y, Q154R, T166I, and D167N (ABE8.20+). The adenosine deaminase domain has at least 85% sequence identity to TadA*7.10.

[0037] In any aspect of the disclosure, or embodiments thereof, the deaminase is a monomer or heterodimer. In any aspect of the disclosure, or embodiments thereof, the base editor polypeptide is an internal base editor (IBE) containing the deaminase domain inserted at an internal location of the napDNAbp.

[0038] In any aspect of the disclosure, or embodiments thereof, the base editor polypeptide further contains one or more nuclear localization sequences (NLS). In any aspect of the disclosure, or embodiments thereof, the base editor polypeptide further contains a bipartite nuclear localization sequence (NLS).

[0039] In any aspect of the disclosure, or embodiments thereof, the deaminase domain is fused to the napDNAbp. In any aspect of the disclosure, or embodiments thereof, the napDNAbp is a nuclease inactive or nickase variant. In any aspect of the disclosure, or embodiments thereof, the napDNAbp contains a Cas9, Cas12a/Cpf1, Cas12b/C2c1, Cas12c/C2c3, Cas12d/CasY, Cas12e/CasX, Cas12g, Cas12h, Cas12i, or Cas12j/CasΦ polypeptide or a portion thereof. In any aspect of the disclosure, or embodiments thereof, where the napDNAbp contains a Cas9 polynucleotide or a portion thereof. In any aspect of the disclosure, or embodiments thereof, the napDNAbp contains a dead Cas9 (dCas9) or a Cas9 nickase (nCas9). In any aspect of the disclosure, or embodiments thereof, the napDNAbp is a modified Staphylococcus aureus Cas9 (SaCas9), Streptococcus thermophilus 1 Cas9 (St1Cas9), Streptococcus pyogenes Cas9 (SpCas9), or variants thereof. In any aspect of the disclosure, or embodiments thereof, the napDNAbp contains a variant of SpCas9 having an altered protospacer-adjacent motif (PAM) specificity. In any aspect of the disclosure, or embodiments thereof, the altered PAM has specificity for the nucleic acid sequence 5′-NGC-3′. In any aspect of the disclosure, or embodiments thereof, the napDNAbp recognizes an NRCH PAM sequence, where R is A or G, and His A, C, or T. In any aspect of the disclosure, or embodiments thereof, the napDNAbp recognizes the PAM nucleotide sequence CACC. In any aspect of the disclosure, or embodiments thereof, the napDNAbp contains a nucleotide sequence with at least 85% sequence identity to the following amino acid sequence: DKKYSIGLAIGTNSVGWAVITDEYKVPSKKFKVLGNTDRHSIKKNLIGALLFDSGETAEATRLK RTARRRYTRRKNRICYLQEIFSNEMAKVDDSFFHRLEESFLVEEDKKHERHPIFGNIVDEVAYH EKYPTIYHLRKKLVDSTDKADLRLIYLALAHMIKFRGHFLIEGDLNPDNSDVDKLFIQLVQTYN QLFEENPINASGVDAKAILSARLSKSRRLENLIAOLPGEKKNGLFGNLIALSLGLTPNFKSNFD LAEDAKLQLSKDTYDDDLDNLLAQIGDQYADLFLAAKNLSDAILLSDILRVNTEITKAPLSASM VKRYDEHHQDLTLLKALVRQQLPEKYKEIFFDQSKNGYAGYIDGGASQEEFYKFIKPILEKMDG TEELLVKLNREDLLRKORTFDNGIIPHQIHLGELHAILRRQGDFYPFLKDNREKIEKILTFRIP YYVGPLARGNSRFAWMTRKSEETITPWNFEEVVDKGASAQSFIERMTNFDKNLPNEKVLPKHSL LYEYFTVYNELTKVKYVTEGMRKPAFLSGEQKKAIVDLLFKTNRKVTVKOLKEDYFKKIECFDS VEISGVEDRFNASLGTYHDLLKIIKDKDFLDNEENEDILEDIVLTLTLFEDREMIEERLKTYAH LFDDKVMKQLKRLRYTGWGRLSRKLINGIRDKQSGKTILDFLKSDGFANRNFMQLIHDDSLTFK EDIQKAQVSGQGDSLHEHIANLAGSPAIKKGILQTVKVVDELVKVMGGHKPENIVIEMARENOT TQKGQKNSRERMKRIEEGIKELGSQILKEHPVENTQLQNEKLYLYYLQNGRDMYVDQELDINRL SDYDVDHIVPQSFLKDDSIDNKVLTRSDKNRGKSDNVPSEEVVKKMKNYWRQLLNAKLITQRKF DNLTKAERGGLSELDKAGFIKRQLVETRQITKHVAQILDSRMNTKYDENDKLIREVKVITLKSK LVSDFRKDFQFYKVREINNYHHAHDAYLNAVVGTALIKKYPKLESEFVYGDYKVYDVRKMIAKS EQEIGKATAKYFFYSNIMNFFKTEITLANGEIRKRPLIETNGETGEIVWDKGRDFATVRKVLSM PQVNIVKKTEVQTGGFSKESILPKGNSDKLIARKKDWDPKKYGGFNSPTVAYSVLVVAKVEKGK SKKLKSVKELLGITIMERSSFEKNPIDFLEAKGYKEVKKDLIIKLPKYSLFELENGRKRMLASA GVLQKGNELALPSKYVNFLYLASHYEKLKGSPEDNEQKOLFVEQHKHYLDEIIEQISEFSKRVI LADANLDKVLSAYNKHRDKPIREQAENIIHLFTLTNLGAPAAFKYFDTTINRKQYNTTKEVLDA TLIRQSITGLYETRIDLSQLG (SEQ ID NO: 938), and recognizes a CACC PAM sequence.

[0040] In any aspect of the disclosure, or embodiments thereof, the method involves administering to the subject an antibody or antigen binding fragment thereof, where the antibody is selected from one or more of ABTx025, ABTx030, ABTx052, ABTx061, ABTx062, ABTx070, ABTx071, ABTx196, ABTx198, ABTx202, ABTx203, ABTx205, ABTx206, ABTx248, ABTx250, ABTx251, ABTx253, ABTx254, ABTx255, ABTx256, ABTx265, ABTx268, ABTx270, ABTx271, ABTx272, ABTx273, ABTx274, ABTx307, ABTx308, ABTx309, and ABTx313.

[0041] In any aspect of the disclosure, or embodiments thereof, the subject has a hemoglobinopathy. In embodiments, the hemoglobinopathy is selected from one or more of sickle cell anemia, thalassemia, Fanconi anemia, aplastic anemia, and Wiskott-Aldrich syndrome.

[0042] In any aspect of the disclosure, or embodiments thereof, the method further involves contacting the hematopoietic stem cell or progenitor thereof with a guide polynucleotide that targets a nucleic acid molecule encoding a beta globin (HBB) polypeptide, thereby introducing an amino acid alteration to an alanine at position 6 of the HBB polypeptide. In any aspect of the disclosure, or embodiments thereof, the method further involves contacting the hematopoietic stem cell or progenitor thereof with a guide polynucleotide that targets the base editor to effect a deamination of a nucleobase of a hemoglobin subunit gamma 1 and/or 2 (HBG1/2) promoter. In any aspect of the disclosure, or embodiments thereof, deamination of the nucleobase disrupts repressor binding to the hemoglobin subunit gamma 1 and/or 2 (HBG1/2) promoter. In any aspect of the disclosure, or embodiments thereof, deamination of the nucleobase effects an increase in gamma globin (HbF) expression.

[0043] In any aspect of the disclosure, or embodiments thereof, the guide polynucleotide contacting the CD117 polynucleotide contains a nucleotide sequence selected from one or more of: AUAAUAGCUGGCAUCACGGU (SEQ ID NO: 693; gRNA931; CC200); CCACUAGCUUUCCAAACGGU (SEQ ID NO: 694; gRNA889); GCUGAACUGAUAGUCAACGU (SEQ ID NO: 695; gRNA908); UUUGACAAAGCCCGGAUCAG (SEQ ID NO: 696; gRNA918); UGAAAGUGAGGCCAGGUACU (SEQ ID NO: 697; gRNA923); AAACAGUCAGGUGAGUGAAU (SEQ ID NO: 698; gRNA928); AACUACAGGAGAAAUAUAAU (SEQ ID NO: 699; gRNA929); and GAUUAAAAGGCACCGAAGGA (SEQ ID NO: 700; gRNA944).

[0044] In any aspect of the disclosure, or embodiments thereof, the guide polynucleotide targeting deamination of a nucleobase of a HBG1/2 promoter, or the guide polynucleotide targeting a nucleic acid molecule encoding a beta globin (HBB) polypeptide contains a nucleotide sequence selected from one or more of: ACUUCUCCACAGGAGUCAGG (SEQ ID NO: 902); GUGGGGAAGGGGCCCCCAAG (SEQ ID NO: 903); AUUGAGAUAGUGUGGGGAAG (SEQ ID NO: 904); CAUUGAGAUAGUGUGGGGAA (SEQ ID NO: 905); GCAUUGAGAUAGUGUGGGGA (SEQ ID NO: 906); GUGGGGAAGGGGCCCCCAAG (SEQ ID NO: 907); GCUAUUGGUCAAGGCAAGGC (SEQ ID NO: 908); CAAGGCUAUUGGUCAAGGCA (SEQ ID NO: 909); CUUGUCAAGGCUAUUGGUCA (SEQ ID NO: 910); CUUGACCAAUAGCCUUGACA (SEQ ID NO: 911); GUUUGCCUUGUCAAGGCUAU (SEQ ID NO: 912); UGGUCAAGUUUGCCUUGUCA (SEQ ID NO: 913); UGGGGAAGGGGCCCCCAAGA (SEQ ID NO: 914); GUGUGGGGAAGGGGCCCCCA (SEQ ID NO: 915); UCAGACAGAUAUUUGCAUUG (SEQ ID NO: 916); UUUCAGACAGAUAUUUGCAU (SEQ ID NO: 917); CUUGCCUUGACCAAUAGCCU (SEQ ID NO: 918); UAGCCUUGACAAGGCAAACU (SEQ ID NO: 919); CAAACUUGACCAAUAGUCUU (SEQ ID NO: 920); UGUGGGGAAGGGGCCCCCAA (SEQ ID NO: 921); GGGCCCCUUCCCCACACUAU (SEQ ID NO: 922); CAGACAGAUAUUUGCAUUGA (SEQ ID NO: 923); UUUCAGACAGAUAUUUGCAU (SEQ ID NO: 924); GCCUUGACAAGGCAAACUUG (SEQ ID NO: 925); UUGACAAGGCAAACUUGACC (SEQ ID NO: 926); UGACCAAUAGUCUUAGAGUA (SEQ ID NO: 927); and AGACAGAUAUUUGCAUUGAGAUA (SEQ ID NO: 928). In any aspect of the disclosure, or embodiments thereof, the guide polynucleotide contains a scaffold with the following nucleotide sequence:

(SEQ ID NO: 317)
GUUUUAGAGCUAGAAAUAGCAAGUUAAAAUAAGGCUAGUCCGUUAUCAA
CUUGAAAAAGUGGCACCGAGUCGGUGCUUUU.

[0045] In any aspect of the disclosure, or embodiments thereof, the hematopoietic stem cell or progenitor thereof is autologous to the subject. In any aspect of the disclosure, or embodiments thereof, the hematopoietic stem cell or progenitor thereof is allogeneic to the subject. In any aspect of the disclosure, or embodiments thereof, the subject is a mammal. In any aspect of the disclosure, or embodiments thereof, the mammal is a canine, feline, human, non-human primate, or rodent.

[0046] In any aspect of the disclosure, or embodiments thereof, the guide polynucleotide is a guide RNA. In any aspect of the disclosure, or embodiments thereof, at least one of the two or more guide polynucleotides contain a nucleotide sequence selected from one or more of: AUAAUAGCUGGCAUCACGGU (SEQ ID NO: 693; gRNA931; CC200); CCACUAGCUUUCCAAACGGU (SEQ ID NO: 694; gRNA889); GCUGAACUGAUAGUCAACGU (SEQ ID NO: 695; gRNA908); UUUGACAAAGCCCGGAUCAG (SEQ ID NO: 696; gRNA918); UGAAAGUGAGGCCAGGUACU (SEQ ID NO: 697; gRNA923); AAACAGUCAGGUGAGUGAAU (SEQ ID NO: 698; gRNA928); AACUACAGGAGAAAUAUAAU (SEQ ID NO: 699; gRNA929); and GAUUAAAAGGCACCGAAGGA (SEQ ID NO: 700; gRNA944). In any aspect of the disclosure, or embodiments thereof, at least one of the two or more guide polynucleotides contains a nucleotide sequence selected from one or more of: ACUUCUCCACAGGAGUCAGG (SEQ ID NO: 902); GUGGGGAAGGGGCCCCCAAG (SEQ ID NO: 903); AUUGAGAUAGUGUGGGGAAG (SEQ ID NO: 904); CAUUGAGAUAGUGUGGGGAA (SEQ ID NO: 905); GCAUUGAGAUAGUGUGGGGA (SEQ ID NO: 906); GUGGGGAAGGGGCCCCCAAG (SEQ ID NO: 907); GCUAUUGGUCAAGGCAAGGC (SEQ ID NO: 908); CAAGGCUAUUGGUCAAGGCA (SEQ ID NO: 909); CUUGUCAAGGCUAUUGGUCA (SEQ ID NO: 910); CUUGACCAAUAGCCUUGACA (SEQ ID NO: 911); GUUUGCCUUGUCAAGGCUAU (SEQ ID NO: 912); UGGUCAAGUUUGCCUUGUCA (SEQ ID NO: 913); UGGGGAAGGGGCCCCCAAGA (SEQ ID NO: 914); GUGUGGGGAAGGGGCCCCCA (SEQ ID NO: 915); UCAGACAGAUAUUUGCAUUG (SEQ ID NO: 916); UUUCAGACAGAUAUUUGCAU (SEQ ID NO: 917); CUUGCCUUGACCAAUAGCCU (SEQ ID NO: 918); UAGCCUUGACAAGGCAAACU (SEQ ID NO: 919); CAAACUUGACCAAUAGUCUU (SEQ ID NO: 920); UGUGGGGAAGGGGCCCCCAA (SEQ ID NO: 921); GGGCCCCUUCCCCACACUAU (SEQ ID NO: 922); CAGACAGAUAUUUGCAUUGA (SEQ ID NO: 923); UUUCAGACAGAUAUUUGCAU (SEQ ID NO: 924); GCCUUGACAAGGCAAACUUG (SEQ ID NO: 925); UUGACAAGGCAAACUUGACC (SEQ ID NO: 926); UGACCAAUAGUCUUAGAGUA (SEQ ID NO: 927); and AGACAGAUAUUUGCAUUGAGAUA (SEQ ID NO: 928). In any aspect of the disclosure, or embodiments thereof, the guide polynucleotide is selected from one or more of: AUAAUAGCUGGCAUCACGGU (SEQ ID NO: 693; gRNA931; CC200); CCACUAGCUUUCCAAACGGU (SEQ ID NO: 694; gRNA889); GCUGAACUGAUAGUCAACGU (SEQ ID NO: 695; gRNA908); UUUGACAAAGCCCGGAUCAG (SEQ ID NO: 696; gRNA918); UGAAAGUGAGGCCAGGUACU (SEQ ID NO: 697; gRNA923); AAACAGUCAGGUGAGUGAAU (SEQ ID NO: 698; gRNA928); AACUACAGGAGAAAUAUAAU (SEQ ID NO: 699; gRNA929); and GAUUAAAAGGCACCGAAGGA (SEQ ID NO: 700; gRNA944).

[0047] In any aspect of the disclosure, or embodiments thereof, the base editor system further contains a guide polynucleotide containing the following polynucleotide sequence:

(SEQ ID NO: 902)
ACUUCUCCACAGGAGUCAGG.

[0048] In any aspect of the disclosure, or embodiments thereof, the antibody contains a heavy chain variable domain (VH) sequence having at least 85% amino acid sequence identity to the amino acid sequence: EVQLVESGGGLVQPGRSLRLSCAASGFTFDDYAMHWVRQAPGKGLEWVSGISWNSGTIGYADSV KGRFTNSRDNAKNSLYLEMNSLRAEDTALYYCAKDSPPGYCSSASCYGAFDIWGQGTMVTVSS (SEQ ID NO: 1120; ABTx025 VH), and/or containing a light chain variable domain (VL) sequence having at least 85% amino acid sequence identity to the amino acid sequence:

(SEQ ID NO: 1121; ABTx025 VL)
DVVMTQSPGTLSLSPGERATLSCRASQSVSSSYLAWYQQKPGQAPRLLI
YGASSRATGIPDRFSGSGSGTDFTLTISRLEPEDFAVYYCQQYGTSLTF
GGGTKLEIKRTV.

[0049] In any aspect of the disclosure, or embodiments thereof, the antibody contains a heavy chain variable domain (VH) sequence having at least 85% amino acid sequence identity to the amino acid sequence: QVQLQESGGGLVKPGGSLRLSCAASGFTFSSYSMNWVRQAPGKGLEWVSSIGTISSYIYYADSV KGRFTISRDNAKNSLYLQMNSLRAEDTAVYYCARDYYGGLFDYWGQGTLVTVSS (SEQ ID NO: 1118; ABTx030 VH), and/or contains a light chain variable domain (VL) sequence having at least 85% amino acid sequence identity to the amino acid sequence:

(SEQ ID NO: 1119; ABTx030 VL)
EIVMTQSPSSLSASVGDRVTITCRASQSISSYLNWYQQKPGKAPKLLIY
AASSLQSGVPSRFSGSGSGTDFTLTISSLQPEDFATYYCQQSYSTPLTF
GGGTKVDIKRTV.

[0050] In any aspect of the disclosure, or embodiments thereof, the antibody contains a heavy chain variable domain (VH) sequence having at least 85% amino acid sequence identity to the amino acid sequence: EVOLVESGGGLVQPGRSLRLSCAASGFTFDDYAMHWVRQAPGKGLEWVSGISWNSGSIGYADSV KGRFTISRDNAKNSLYLQMNSLRAEDTALYYCAKDTPLGYCSTTSCYGAFDIWGQGTMVTVSS (SEQ ID NO: 1126; ABTx061 VH), and/or contains a light chain variable domain (VL) sequence having at least 85% amino acid sequence identity to the amino acid sequence:

(SEQ ID NO: 1127; ABTx061 VL)
EIVLAQSPGTLSLSPGERATLSCRASQSVSSSYLAWYQQKPGQAPRLLI
YGASSRATGIPDRFSGSGSGTDFTLTISRLEPEDFAVYYCQQYGSSPLT
FGGGTKLEIKRTV.

[0051] In any aspect of the disclosure, or embodiments thereof, the antibody contains a heavy chain variable domain (VH) sequence having at least 85% amino acid sequence identity to the amino acid sequence: EVOLVESGGGLVQPGRSLRLSCSASGFTFDDYAMHWVRQAPGKGLEWVSGISWNSGTIGYADSV KGRFTISRDNAKNSLYLQMNSLRAEDTALYYCAKDSPPGYCSSASCYGAFDIWGQGTTVTVSS (SEQ ID NO: 1128; ABTx062 VH), and/or contains a light chain variable domain (VL) sequence having at least 85% amino acid sequence identity to the amino acid sequence:

(SEQ ID NO: 1129; ABTx062 VL)
DIQLTQSPSSLSASVGDRVTITCRASQSISSYLNWYQQKPGKAPKLLIY
AASSLQSGVPSRFSGSGSGTDFTLTINSLQPEDFATYYCQQSYSTPFTF
GPGTKVEIKRTV.

[0052] In any aspect of the disclosure, or embodiments thereof, the antibody contains a heavy chain variable domain (VH) sequence having at least 85% amino acid sequence identity to the amino acid sequence: EVOLVESGGGVVRPGGSLRLSCAASGFTFDDYGMSWVRQAPGKGLEWVSDINWNGGSTGYADSV KGRFTISRDNAKNSLYLQMNSLRAEDTALYYCARESWDGSGIYYMDVWGKGTTVTVSS (SEQ ID NO: 1130; ABTx070 VH), and/or contains a light chain variable domain (VL) sequence having at least 85% amino acid sequence identity to the amino acid sequence:

(SEQ ID NO: 1131; ABTx070 VL)
DIVMTQSPSFLSASVGDRVTITCRASQGISSYLNWYQQKPGKAPKLLIY
AASTLQNGVPSRFSGSGSGTDFTLTISSLQPEDFATYYCQQSYSTPITF
GQGTRLEIKRTV.

[0053] In any aspect of the disclosure, or embodiments thereof, the antibody contains a heavy chain variable domain (VH) sequence having at least 85% amino acid sequence identity to the amino acid sequence: EVOLVESGGGVVRPGGSLRLSCAASGFTFDDYGMSWVRQAPGKGLEWVSGINWNGGSTGYADSV KGRFTISRDNAKNSLHLQMNSLRAEDTALYYCARESWNYEGYYYMDVWGKGTTVTVSS (SEQ ID NO: 1132; ABTx071 VH), and/or contains a light chain variable domain (VL) sequence having at least 85% amino acid sequence identity to the amino acid sequence:

(SEQ ID NO: 1133; ABTx071 VL)
AIQMTQSPSFLSASVGDRVTITCRASQGISSYLAWYQQKPGKAPKLLIY
AASTLONGVPSRFSGSGSGTEFTLTISSLOPEDFATYYCQQLNSYPYTF
GQGTKLEIKRTV.

[0054] In any aspect of the disclosure, or embodiments thereof, the antibody contains a heavy chain variable domain (VH) sequence having at least 85% amino acid sequence identity to the amino acid sequence: QVQLVQSGAAVKKPGESLKISCKGSGYRFTSYWIGWVRQMPGKGLEWMGIIYPGDSDTRYSPSF QGQVTISAGKSISTAYLOWSSLKASDTAMYYCARHGRGYDGYDGAFDIWGQGTMVTVSS (SEQ ID NO: 1122; ABTx313 VH), and/or contains a light chain variable domain (VL) sequence having at least 85% amino acid sequence identity to the amino acid sequence:

(SEQ ID NO: 1123; ABTx313 VL)
AIQLTQSPSSLSASVGDRVTITCRASQGISSALAWYQQKPGKAPKLLIY
DASSLESGVPSRFSGSGSGTDFTLTISSLQPEDFATYYCQQFSSYPLTF
GGGTKVEIKRTV.

[0055] In any aspect of the disclosure, or embodiments thereof, the antibody contains a heavy chain variable domain (VH) sequence having at least 85% amino acid sequence identity to the amino acid sequence: QVQLVQSGAAVKKPGESLKISCKGSGYRFTSYWIGWVRQMPGKGLEWMGIIYPGDSDTRYSPSF QGQVTISAGKSISTAYLQWSSLKASDTAMYYCARHGRGYDGYDGAFDIWGQGTMVTVSS (SEQ ID NO: 1122; ABTx307 VH), and/or containing a light chain variable domain (VL) sequence having at least 85% amino acid sequence identity to the amino acid sequence:

(SEQ ID NO: 960; ABTx307 VL)
AIQLTQSPSSLSASVGDRVTITCRASQGISSALAWYQQKPGKAPKLLIY
DASSLESGVPSRFSGSGSGTDFTLTISSLQPEDFATYYCQQFNSYPLTF
GGGTKVEIKRTV.

[0056] In any aspect of the disclosure, or embodiments thereof, the antibody contains a heavy chain variable domain (VH) sequence having at least 85% amino acid sequence identity to the amino acid sequence: QVQLVQSGAAVKKPGESLKISCKGSGYRFTSYWIGWVRQMPGKGLEWMGIIYPGDSDTKYSPSF QGQVTISAGKSISTAYLQWSSLKASDTAMYYCARHGRGYDAYDGAFDIWGQGTMVTVSS (ID NO: 1124; ABTx308 VH), and/or contains a light chain variable domain (VL) sequence having at least 85% amino acid sequence identity to the amino acid sequence:

(SEQ ID NO: 1123; ABTx308 VL)
AIQLTQSPSSLSASVGDRVTITCRASQGISSALAWYQQKPGKAPKLLIY
DASSLESGVPSRFSGSGSGTDFTLTISSLQPEDFATYYCQQFSSYPLTF
GGGTKVEIKRTV.

[0057] In any aspect of the disclosure, or embodiments thereof, the antibody contains a heavy chain variable domain (VH) sequence having at least 85% amino acid sequence identity to the amino acid sequence: QVQLVQSGAAVKKPGESLKISCKGSGYRFTSYWIGWVRQMPGKGLEWMGIIYPGDSDTRYSPSF QGQVTISAGKSISTAYLOWSSLKASDTAMYYCARHGRGYDAYDGAFDIWGQGTMVTVSS (SEQ ID NO: 1124; ABTx309 VH), and/or contains a light chain variable domain (VL) sequence having at least 85% amino acid sequence identity to the amino acid sequence:

(SEQ ID NO: 1125; ABTx309 VL)
AIQLTQSPSSLSASVGDRVTITCRASQGISSALAWYQQKPGKAPKLLIY
DASSLESGVPSRFSGSGSGTDFTLTISSLQPEDFATYYCQQTNSYPLTF
GGGTKVEIKRTV.

[0058] In any aspect of the disclosure, or embodiments thereof, the antibody contains a heavy chain variable domain (VH) sequence having at least 85% amino acid sequence identity to the amino acid sequence: EVOLVESGGGLVQPGRSLRLSCAASGFTFDDYAMHWVRQAPGKGLEWVSGISWNSGTIGYADSV KGRFTNSRDNAKNSLYLEMNSLRAEDTALYYCAKDSPPGYCSSASCYGAFDIWGQGTMVTVSS (SEQ ID NO: 1120; ABTx196 VH), and/or contains a light chain variable domain (VL) sequence having at least 85% amino acid sequence identity to the amino acid sequence:

(SEQ ID NO: 1068; ABTx196 VL)
DVVMTQSPGTLSLSPGERATLSCRASQSVSSSYLAWYQQKPGQAPRLLI
YGASSRATGIPDRFSGSGSGTDFTLTISRLEPEDFAVYYCQQSETCLTF
GGGTKLEIK.

[0059] In any aspect of the disclosure, or embodiments thereof, the antibody contains a heavy chain variable domain (VH) sequence having at least 85% amino acid sequence identity to the amino acid sequence: EVOLVESGGGLVQPGRSLRLSCAASGFTFDDYAMHWVRQAPGKGLEWVSGISWNSGTIGYADSV KGRFTSSRDNAKNSLYLEMNSLRAEDTALYYCAKDSPPGYCSSASCYGAFDIWGQGTMVTVSS (SEQ ID NO: 1085; ABTx202 VH), and/or contains a light chain variable domain (VL) sequence having at least 85% amino acid sequence identity to the amino acid sequence:

(SEQ ID NO: 1086; ABTx202 VL)
EIVMTQSPGTLSLSPGERATLSCRASQSVSSSYLAWYQQKPGQAPRLLI
YGSSTRATGIPARFSGSGSGTEFALTISSLSEDFAVYYCQQYNFWPYT
FGQGTKVEIK.

[0060] In any aspect of the disclosure, or embodiments thereof, the antibody contains a heavy chain variable domain (VH) sequence having at least 85% amino acid sequence identity to the amino acid sequence: EVOLVESGGGLVQPGRSLRLSCAASGFTFDDYAMHWVRQAPGKGLEWVSGISWNSGTIGYADSV KGRFTNSRDNAKNSLYLEMNSLRAEDTALYYCAKDSPPGYCASASCYGAFDIWGQGTMVTVSS (SEQ ID NO: 1089; ABTx198 VH), and/or contains a light chain variable domain (VL) sequence having at least 85% amino acid sequence identity to the amino acid sequence:

(SEQ ID NO: 1103; ABTx198 VL)
DVVMTQSPGTLSLSPGERATLSCRASQSVSSSYLAWYQQKPGQAPRLLI
YGASSRATGIPDRFSGSGSGTDFTLTISRLEPEDFAVYYCQQDSLGLTF
GGGTKLEIK .

[0061] In any aspect of the disclosure, or embodiments thereof, the antibody contains a heavy chain variable domain (VH) sequence having at least 85% amino acid sequence identity to the amino acid sequence: EVOLVESGGGLVQPGRSLRLSCAASGFTFDDYAMHWVRQAPGKGLEWVSGISWNSGTIGYADSV KGRFTNSRDNAKNSLYLEMNSLRAEDTALYYCAKDWPSGFCSSAYCYGAFDIWGQGTMVTVSS (SEQ ID NO: 1092; ABTx203, VH), and/or contains a light chain variable domain (VL) sequence having at least 85% amino acid sequence identity to the amino acid sequence:

(SEQ ID NO: 1093; ABTx203, VL)
DIVMTQSPSFLSASVGDRVTITCRASQGISSYLAWYQQKPGKAPKLLIY
AASTLQNGVPSRFSGSGSGTDFTLTITSLQPEDFATYYCQQSYSTPYTF
GQGTKLEIK.

[0062] In any aspect of the disclosure, or embodiments thereof, the antibody contains a heavy chain variable domain (VH) sequence having at least 85% amino acid sequence identity to the amino acid sequence: EVOLVESGGGLVQPGRSLRLSCAASGFTFDDYAMHWVRQAPGKGLEWVSGISWNSGTIGYADSV KGRFTNSRDNAKNSLYLEMNSLRAEDTALYYCAKDSPPGYCSSASCYGAFDIWGQGTMVTVSS (SEQ ID NO: 1120; ABTx205 VH), and/or contains a light chain variable domain (VL) sequence having at least 85% amino acid sequence identity to the amino acid sequence:

(SEQ ID NO: 1093; ABTx205 VL)
DIVMTQSPSFLSASVGDRVTITCRASQGISSYLAWYQQKPGKAPKLLIY
AASTLQNGVPSRFSGSGSGTDFTLTITSLQPEDFATYYCQQSYSTPYTF
GQGTKLEIK

[0063] In any aspect of the disclosure, or embodiments thereof, the antibody contains a heavy chain variable domain (VH) sequence having at least 85% amino acid sequence identity to the amino acid sequence: EVQLVESGGGLVQPGRSLRLSCAASGFTFDDYAMHWVRQAPGKGLEWVSGISWNSGTIGYADSV KGRFTNSRDNAKNSLYLEMNSLRAEDTALYYCAKDSPPGYCSSASCYGAFDIRGQGTMVTVSS (SEQ ID NO: 1101; ABTx206 VH), and/or contains a light chain variable domain (VL) sequence having at least 85% amino acid sequence identity to the amino acid sequence:

(SEQ ID NO: 1093)
DIVMTQSPSFLSASVGDRVTITCRASQGISSYLAWYQQKPGKAPKLLIY
AASTLQNGVPSRFSGSGSGTDFTLTITSLQPEDFATYYCQQSYSTPYTF
GQGTKLEIK.

[0064] In any aspect of the disclosure, or embodiments thereof, the subject has a percent chimerism for the edited cells or cells derived or descended from the edited cells of at least about 10%, 20%, 30%, 40%, 50%, 60%, 70%, 80%, or 90% at 1 wk, 2 wks, 3 wks, 4 wks, 5 wks, 6 wks, 7 wks, 8 wks, 9 wks, 10 wks, 11 wks, and/or 12 wks following administration of the antibody or antigen binding fragment thereof. In embodiments, the percent chimerism is measured for bulk bone marrow, CD34+ cells, CD235a+ cells, CD19+ cells, and/or CD45+ cells.

[0065] In any aspect of the disclosure, or embodiments thereof, the method involves contacting a hematopoietic stem cell or progenitor thereof with a guide polynucleotide containing a spacer sequence corresponding to gRNA931 (CC200) and another guide polynucleotide containing a spacer sequence corresponding to sgRNA_027. In any aspect of the disclosure, or embodiments thereof, the base editor contains a TadA*8.20 adenosine deaminase domain. In any aspect of the disclosure, or embodiments thereof, the base editor contains a Cas9-NRCH napDNAbp domain. In any aspect of the disclosure, or embodiments thereof, the base editor is ABE8.20-NRCH. In any aspect of the disclosure, or embodiments thereof, the antibody is ABTx052, contains VH CDR1, VH CDR2, VH CDR3, VL CDR1, VL CDR2, and VL CDR3 of ABTx052, and/or contains a VH domain with at least 95% sequence identity to the VH domain of ABTx052 and a VL domain with at least 95% sequence identity to the VL domain of ABTx052. In any aspect of the disclosure, or embodiments thereof, the composition contains with a guide polynucleotide containing a spacer sequence corresponding to gRNA931 (CC200), a guide polynucleotide containing a spacer sequence corresponding to sgRNA_027, and/or an mRNA encoding the base editor ABE8.20-NRCH.

[0066] In any aspect of the disclosure, or embodiments thereof, the method involves (A) base editing hematopoietic stem cells or progenitor thereof by contacting them with (i) a guide polynucleotide containing a spacer sequence corresponding to gRNA931 (CC200) and another guide polynucleotide containing a spacer sequence corresponding to sgRNA_027, or polynucleotides encoding the same, and (ii) an ABE-NRCH base editor, or a polynucleotide encoding the same; (B) administering the base-edited hematopoietic stem cell or progenitor thereof to a subject; and (C) administering to the subject an ABTx052 antibody before, after, or concurrently with administration of the base-edited hematopoietic stem cells.

[0067] In any aspect of the disclosure, or embodiments thereof, the antibody, antibody drug conjugate, or chimeric antigen receptor contains complementarity determining regions (CDRs) that contain the following heavy chain variable region (VH) CDR and light chain variable region (VL) CDR amino acid sequences: VH CDR1: GYRFTSYW (SEQ ID NO: 421); VH CDR2 is IYPGDSDTR (SEQ ID NO: 958) or TYPGDSDTK (SEQ ID NO: 972); VH CDR3: ARHGRGYXYXGAFDI (SEQ ID NO: 944); VL CDR1: QGISSA (SEQ ID NO: 424); VL CDR2: DAS; and VL CDR3 is selected from one or more of QQXSYPLT (SEQ ID NO: 945), QQXSHPLT (SEQ ID NO: 946), and QQXSSPLT (SEQ ID NO: 947). X indicates any amino acid. The anti-CD117 antibody contains at least one amino acid alteration relative to the amino acid sequence of ABTx052.

[0068] In any aspect of the disclosure, or embodiments thereof, VH CDR3 is selected from one or more of ARHGRGYDGYEGAFDI (SEQ ID NO: 948), ARHGRGYNAYEGAFDI (SEQ ID NO: 949), ARHGRGYNGYDGAFDI (SEQ ID NO: 950), ARHGRGYDGYDGAFDI (SEQ ID NO: 1012), ARHGRGYDAYEGAFDI (SEQ ID NO: 1027), and ARHGRGYDAYDGAFDI (SEQ ID NO: 1032), and/or VL CDR3 is selected from one or more of QQTNSYPLT (SEQ ID NO: 951), QQVNSYPLT (SEQ ID NO: 952), QQFRSYPLT (SEQ ID NO: 953), QQFYSYPLT (SEQ ID NO: 954), QQFNSHPLT (SEQ ID NO: 955), QQFNSSPLT (SEQ ID NO: 956), QQFSSYPLT (SEQ ID NO: 1020), QQTNSHPLT (SEQ ID NO: 1023), QQVRSYPLT (SEQ ID NO: 1025), QQTYSYPLT (SEQ ID NO: 1029), QQFNSTPLT (SEQ ID NO: 1033), and QQTRSYPLT (SEQ ID NO: 1036).

[0069] In any aspect of the disclosure, or embodiments thereof, the antibody selectively binds wild type CD117. In any aspect of the disclosure, or embodiments thereof, the antibody has a rate of dissociation constant for binding to wild type CD117 that is less than about 4.0E-04 or 4.5.0E-03.

[0070] In any aspect of the disclosure, or embodiments thereof, the antibody has reduced binding to a CD117 variant containing a Y259C, N260D, and/or S261G amino acid alteration, where the reduced binding is relative to anti-CD117 antibody ABTx052 or ABTx135. In any aspect of the disclosure, or embodiments thereof, the antibody has reduced binding to a CD117 variant containing the amino acid alterations Y259C and N260D and to a CD117 variant containing the amino acid alteration S261G, where the reduced binding is relative to anti-CD117 antibody ABTx052 or ABTx135.

[0071] In any aspect of the disclosure, or embodiments thereof, the antibody contains variable heavy chain (VH) and variable light chain (VL) framework regions (FR) containing the following amino acid sequences: VH FR1: QVQLVQSGAAVKKPGESLKISCKGS (SEQ ID NO: 426); VH FR2: IGWVRQMPGKGLEWMGI (SEQ ID NO: 427); VH FR3: YSPSFQGQVTISAGKSISTAYLOWSSLKASDTAMYYC (SEQ ID NO: 973); VH FR4: WGQGTMVTVSS (SEQ ID NO: 429); VL FR1: AIQLTQSPSSLSASVGDRVTITCRAS (SEQ ID NO: 430); VL FR2: LAWYQQKPGKAPKLLIY (SEQ ID NO: 431); VL FR3: SLESGVPSRFSGSGSGTDFTLTISSLQPEDFATYYC (SEQ ID NO: 432); and VL FR4: FGGGTKVEIKRTV (SEQ ID NO: 433).

[0072] In any aspect of the disclosure, or embodiments thereof, the antibody is a human IgG1 antibody.

[0073] In any aspect of the disclosure, or embodiments thereof, the antibody or antigen binding fragment thereof, antibody drug conjugate, or a chimeric antigen receptor T (CAR-T) cell is administered before, after, or concurrently with the edited cell.

[0074] In any aspect provided herein, or embodiments thereof, the method is not a process for modifying the germline genetic identity of human beings.

[0075] In any aspect provided herein, or embodiments thereof, the antibody has an EC50 on a target cell of less than about 0.1 nM. In any aspect provided herein, or embodiments thereof, the antibody has polyspecificity that is similar to or lower than the polyspecificity of ABTx052. In any aspect provided herein, or embodiments thereof, the antibody is effective in reducing the viability of a hematopoietic stem cell (HSC) expressing a wild type CD117 polypeptide. In any aspect provided herein, or embodiments thereof, the antibody has an IC50 value for reducing viability of the HSC that is less than 5E-006 molar.

[0076] In any aspect of the disclosure, or embodiments thereof: A) VH CDR1 is selected from one or more of: GYRFTSYW (SEQ ID NO: 421), GFTFSSYS (SEQ ID NO: 406), GFTEDDYG (SEQ ID NO: 466), and GFTFDDYA (SEQ ID NO: 435); B) VH CDR2 is selected from one or more of: IYPGDSDTK (SEQ ID NO: 972), TYPGDSDTR (SEQ ID NO: 958), IGTISSYIY (SEQ ID NO: 1113), INWNGGSTG (SEQ ID NO: 1114), ISWNSGSIG (SEQ ID NO: 1115), and ISWNSGTIG (SEQ ID NO: 1070); C) VH CDR3 is selected from one or more of: ARHGRGYDAYDGAFDI (SEQ ID NO: 1032), ARHGRGYDGYDGAFDI (SEQ ID NO: 1012), ARDYYGGLFDY (SEQ ID NO: 408), ARESWDGSGIYYMDV (SEQ ID NO: 468), ARESWNYEGYYYMDV (SEQ ID NO: 483), AKDTPLGYCSTTSCYGAFDI (SEQ ID NO: 438), AKDWPSGFCSSAYCYGAFDI (SEQ ID NO: 1094), AKDSPPGYCSSASCYGAFDI (SEQ ID NO: 453), and AKDSPPGYCASASCYGAFDI (SEQ ID NO: 1090); D) VL CDR1 is selected from one or more of: QGISSA (SEQ ID NO: 424), QSISSY (SEQ ID NO: 409), QGISSY (SEQ ID NO: 469), and QSVSSSY (SEQ ID NO: 439); E) VL CDR2 is selected from one or more of: DAS, AAS, GSS, and GAS; and/or F) VL CDR3 is selected from one or more of: QQTNSYPLT (SEQ ID NO: 1044), QQFSSYPLT (SEQ ID NO: 1022), QQFNSYPLT (SEQ ID NO: 425), QQSYSTPLT (SEQ ID NO: 410), QQSYSTPFT (SEQ ID NO: 455), QQLNSYPYT (SEQ ID NO: 485), QQSYSTPIT (SEQ ID NO: 470), QQSYSTPYT (SEQ ID NO: 1097), QQYNFWPYT (SEQ ID NO: 1084), QQYGSSPLT (SEQ ID NO: 440), QQYGTSLT (SEQ ID NO: 395), QQSETCLT (SEQ ID NO: 1074), and QQDSLGLT (SEQ ID NO: 1091).

[0077] In any aspect of the disclosure, or embodiments thereof, the antibody contains variable heavy chain (VH) and variable light chain (VL) framework regions (FR), where A) VH FR1 is selected from one or more of: QVQLVQSGAAVKKPGESLKISCKGS (SEQ ID NO: 426), QVQLQESGGGLVKPGGSLRLSCAAS (SEQ ID NO: 411), EVOLVESGGGVVRPGGSLRLSCAAS (SEQ ID NO: 471), EVOLVESGGGLVQPGRSLRLSCAAS (SEQ ID NO: 396), and EVOLVESGGGLVQPGRSLRLSCSAS (SEQ ID NO: 456); B) VH FR2 is selected from one or more of: IGWVRQMPGKGLEWMGI (SEQ ID NO: 427), MNWVRQAPGKGLEWVSS (SEQ ID NO: 412), MSWVRQAPGKGLEWVSD (SEQ ID NO: 472), MSWVRQAPGKGLEWVSG (SEQ ID NO: 487), and MHWVRQAPGKGLEWVSG (SEQ ID NO: 397); C) VH FR3 is selected from one or more of: YSPSFQGQVTISAGKSISTAYLQWSSLKASDTAMYYC (SEQ ID NO: 973), YADSVKGRFTISRDNAKNSLYLOMNSLRAEDTAVYYC (SEQ ID NO: 413), YADSVKGRFTISRDNAKNSLYLQMNSLRAEDTALYYC (SEQ ID NO: 1116), YADSVKGRFTISRDNAKNSLHLQMNSLRAEDTALYYC (SEQ ID NO: 1117), YADSVKGRFTNSRDNAKNSLYLEMNSLRAEDTALYYC (SEQ ID NO: 1077), and YADSVKGRFTSSRDNAKNSLYLEMNSLRAEDTALYYC (SEQ ID NO: 1065); D) VH FR4 is selected from one or more of: WGQGTMVTVSS (SEQ ID NO: 389), WGQGTLVTVSS (SEQ ID NO: 414), WGKGTTVTVSS (SEQ ID NO: 474), WGQGTTVTVSS (SEQ ID NO: 459), and RGQGTMVTVSS (SEQ ID NO: 1102); E) VL FR1 is selected from one or more of: AIQLTQSPSSLSASVGDRVTITCRAS (SEQ ID NO: 430), EIVMTQSPSSLSASVGDRVTITCRAS (SEQ ID NO: 415), [sequence omitted] (SEQ ID NO: 460), AIQMTQSPSFLSASVGDRVTITCRAS (SEQ ID NO: 490), DIVMTQSPSFLSASVGDRVTITCRAS (SEQ ID NO: 475), EIVMTQSPGTLSLSPGERATLSCRAS (SEQ ID NO: 1087), EIVLAQSPGTLSLSPGERATLSCRAS (SEQ ID NO: 445), and DVVMTQSPGTLSLSPGERATLSCRAS (SEQ ID NO: 400); F) VL FR2 is selected from one or more of: LAWYQQKPGKAPKLLIY (SEQ ID NO: 431), LNWYQQKPGKAPKLLIY (SEQ ID NO: 416), and LAWYQQKPGQAPRLLIY (SEQ ID NO: 446); G) VL FR3 is selected from one or more of: SLESGVPSRFSGSGSGTDFTLTISSLOPEDFATYYC (SEQ ID NO: 432), SLQSGVPSRFSGSGSGTDFTLTISSLOPEDFATYYC (SEQ ID NO: 417), SLQSGVPSRFSGSGSGTDFTLTINSLOPEDFATYYC (SEQ ID NO: 462), TLQNGVPSRFSGSGSGTEFTLTISSLOPEDFATYYC (SEQ ID NO: 492), TLQNGVPSRFSGSGSGTDFTLTISSLQPEDFATYYC (SEQ ID NO: 477), TLQNGVPSRFSGSGSGTDFTLTITSLQPEDFATYYC (SEQ ID NO: 1099), TRATGIPARFSGSGSGTEFALTISSLQSEDFAVYYC (SEQ ID NO: 1080), and [sequence omitted] (SEQ ID NO: 402); and/or H) VL FR4 is selected from one or more of: FGGGTKVEIKRTV (SEQ ID NO: 433), FGGGTKVDIKRTV (SEQ ID NO: 418), FGPGTKVEIKRTV (SEQ ID NO: 463), FGQGTKLEIKRTV (SEQ ID NO: 493), FGQGTRLEIKRTV (SEQ ID NO: 478), FGQGTKLEIK (SEQ ID NO: 1100), FGQGTKVEIK (SEQ ID NO: 1088), FGGGTKLEIKRTV (SEQ ID NO: 403), and FGGGTKLEIK (SEQ ID NO: 1082).

[0078] In any aspect of the disclosure, or embodiments thereof, the hemoglobinopathy is selected from one or more of sickle cell anemia, thalassemia, Fanconi anemia, aplastic anemia, and Wiskott-Aldrich syndrome.

[0079] In any aspect of the disclosure, or embodiments thereof, step (b) takes place before, after, or concurrently with step (a).

[0080] In any aspect of the disclosure, or embodiments thereof, the CD117 polypeptide contains an S261G alteration.

[0081] In any aspect of the disclosure, or embodiments thereof, the sequence of consecutive amino acids has at least 90%, 95%, 99%, 99.5%, or 99.9% sequence identity to the fragment. In any aspect of the disclosure, or embodiments thereof, the CD117 polypeptide has at least 90%, 95%, 99%, 99.5%, or 99.9% sequence identity to the amino acid sequence.

### Definitions

[0082] Unless defined otherwise, all technical and scientific terms used herein have the meaning commonly understood by a person skilled in the art to which this disclosure belongs. The following references provide one of skill with a general definition of many of the terms used in this disclosure: Singleton et al., Dictionary of Microbiology and Molecular Biology (2nd ed. 1994); The Cambridge Dictionary of Science and Technology (Walker ed., 1988); The Glossary of Genetics, 5th Ed., R. Rieger et al. (eds.), Springer Verlag (1991); and Hale & Marham, The Harper Collins Dictionary of Biology (1991). As used herein, the following terms have the meanings ascribed to them below, unless specified otherwise.

[0083] By “ABTx025” is meant an antibody having at least about 85% amino acid sequence identity to an antibody sequence of antibody ABTx025 or comprising VH and/or VL CDRs 1-3 of ABTx025 or antigen binding fragments thereof, wherein each of the antibody, CDRs, and antigen binding fragments specifically bind to a wild type CD117 polypeptide but fail to detectably bind or have only reduced binding to an altered CD117 polypeptide. In embodiments, the antibody or antigen binding fragment thereof has at least 90%, 93%, 95%, 98%, 99% or 100% amino acid sequence identity to an antibody sequence of antibody ABTx025. Exemplary heavy chain and light chain sequences for antibody ABTx025 are provided below, where the variable regions are in plain text, the constant domains are in bold, and complementarity determining regions (CDRs), i.e., CDR1, CDR2, and CDR2, are underlined:

ABTx025 heavy chain (HC):
(SEQ ID NO: 389)
EVQLVESGGGLVQPGRSLRLSCAASGFTFDDYAMHWVRQAPGKGLEWVS
GISWNSGTIGYADSVKGRFTNSRDNAKNSLYLEMNSLRAEDTALYYCAK
DSPPGYCSSASCYGAFDIWGQGTMVTVSSASTKGPSVFPLAPSSKSTSG
GTAALGCLVKDYFPEPVTVSWNSGALTSGVHTFPAVLQSSGLYSLSSVV
TVPSSSLGTQTYICNVNHKPSNTKVDKKVEPKSCDKTHTCPPCPAPELL
GGPSVFLFPPKPKDTLMISRTPEVTCVVVDVSHEDPEVKFNWYVDGVEV
HNAKTKPREEQYNSTYRVVSVLTVLHQDWLNGKEYKCKVSNKALPAPIE
KTISKAKGQPREPQVYTLPPSRDELTKNQVSLTCLVKGFYPSDIAVEWE
SNGQPENNYKTTPPVLDSDGSFFLYSKLTVDKSRWQQGNVFSCSVMHEA
LHNHYTQKSLSLSPGK
ABTx025 light chain (LC):
(SEQ ID NO: 390)
DVVMTQSPGTLSLSPGERATLSCRASQSVSSSYLAWYQQKPGQAPRLLI
YGASSRATGIPDRFSGSGSGTDFTLTISRLEPEDFAVYYCQQYGTSLTF
GGGTKLEIKRTVAAPSVFIFPPSDEQLKSGTASVVCLLNNFYPREAKVQ
WKVDNALQSGNSQESVTEQDSKDSTYSLSSTLTLSKADYEKHKVYACEV
THQGLSSPVTKSFNRGEC.

[0084] The three CDRs of the ABTx025 antibody VH region are as follows:

VH CDR1:
(SEQ ID NO: 391)
GFTFDDYA;
VH CDR2:
(SEQ ID NO: 392)
ISWNSGTI;
and
VH CDR3:
(SEQ ID NO: 393)
AKDSPPGYCSSASCYGAFDI.

[0085] The three CDRs of the ABTx025 antibody VL region are as follows:

VL CDR1:
(SEQ ID NO: 394)
QSVSSSY;
VL CDR2:
GAS;
and
VL CDR3:
(SEQ ID NO: 395)
QQYGTSLT.

[0086] The four framework (FR) regions, i.e., FR1, FR2, FR3, and FR4, of the ABTx025 antibody are located on either side of each of the CDRs in VH and VL region sequences shown supra. In particular, the four FRs of the ABTx025 antibody VH region are as follows:

VH FR1:
(SEQ ID NO: 396)
[sequence omitted];
VH FR2:
(SEQ ID NO: 397)
MHWVRQAPGKGLEWVSG;
VH FR3:
(SEQ ID NO: 398)
IGYADSVKGRFTNSRDNAKNSLYLEMNSLRAEDTALYYC;
and
VH FR4:
(SEQ ID NO: 399)
WGQGTMVTVSS.

[0087] The four FRs of the ABTx025 antibody VL region are as follows:

VL FR1:
(SEQ ID NO: 400)
DVVMTQSPGTLSLSPGERATLSCRAS;
VL FR2:
(SEQ ID NO: 401)
LAWYQQKPGQAPRLLIY;
VL FR3:
(SEQ ID NO: 402)
[sequence omitted];
and
VL FR4:
(SEQ ID NO: 403)
FGGGTKLEIKRTV.

[0088] By “ABTx025 polynucleotide” is meant a nucleic acid molecule (e.g., DNA) encoding at least a fragment of an ABTx025 antibody. In an embodiment, the encoded fragment has antigen binding activity.

[0089] By “ABTx030” is meant an antibody having at least about 85% amino acid sequence identity to an antibody sequence of antibody ABTx030 or comprising VH and/or VL CDRs 1-3 of ABTx030 or antigen binding fragments thereof, wherein each of the antibody, CDRs, and antigen binding fragments specifically bind to a wild type CD117 polypeptide but fail to detectably bind or have only reduced binding to an altered CD117 polypeptide. In embodiments, the antibody or antigen binding fragment thereof has at least 90%, 93%, 95%, 98%, 99% or 100% amino acid sequence identity to an antibody sequence of antibody ABTx030. Exemplary heavy chain and light chain sequences for antibody ABTx030 are provided below, where the variable regions are in plain text, the constant domains are in bold, and complementarity determining regions (CDRs), i.e., CDR1, CDR2, and CDR2, are underlined:

ABTx030 heavy chain (HC):
(SEQ ID NO: 404)
QVQLQESGGGLVKPGGSLRLSCAASGFTFSSYSMNWVRQAPGKGLEWVS
SIGTISSYIYYADSVKGRFTISRDNAKNSLYLQMNSLRAEDTAVYYCAR
DYYGGLFDYWGQGTLVTVSSASTKGPSVFPLAPSSKSTSGGTAALGCLV
KDYFPEPVTVSWNSGALTSGVHTFPAVLQSSGLYSLSSVVTVPSSSLGT
QTYICNVNHKPSNTKVDKKVEPKSCDKTHTCPPCPAPELLGGPSVFLFP
PKPKDTLMISRTPEVTCVVVDVSHEDPEVKFNWYVDGVEVHNAKTKPRE
EQYNSTYRVVSVLTVLHQDWLNGKEYKCKVSNKALPAPIEKTISKAKGQ
PREPQVYTLPPSRDELTKNQVSLTCLVKGFYPSDIAVEWESNGQPENNY
KTTPPVLDSDGSFFLYSKLTVDKSRWQQGNVFSCSVMHEALHNHYTQKS
LSLSPGK
ABTx030 light chain (LC):
(SEQ ID NO: 405)
EIVMTQSPSSLSASVGDRVTITCRASQSISSYLNWYQQKPGKAPKLLIY
AASSLQSGVPSRFSGSGSGTDFTLTISSLQPEDFATYYCQQSYSTPLTF
GGGTKVDIKRTVAAPSVFIFPPSDEQLKSGTASVVCLLNNFYPREAKVQ
WKVDNALQSGNSQESVTEQDSKDSTYSLSSTLTLSKADYEKHKVYACEV
THQGLSSPVTKSFNRGEC.

[0090] The three CDRs of the ABTx030 antibody VH region are as follows:

VH CDR1:
(SEQ ID NO: 406)
GFTFSSYS;
VH CDR2:
(SEQ ID NO: 407)
IGTISSYI
or
(SEQ ID NO: 1113)
IGTISSYIY;
and
VH CDR3:
(SEQ ID NO: 408)
ARDYYGGLFDY.

[0091] The three CDRs of the ABTx030 antibody VL region are as follows:

VL CDR1:
(SEQ ID NO: 409)
QSISSY;
VL CDR2:
AAS;
and
VL CDR3:
(SEQ ID NO: 410)
QQSYSTPLT.

[0092] The four framework (FR) regions, i.e., FR1, FR2, FR3, and FR4, of the ABTx030 antibody are located on either side of each of the CDRs in VH and VL region sequences shown supra. In particular, the four FRs of the ABTx030 antibody VH region are as follows:

VH FR1:
(SEQ ID NO: 411)
QVQLQESGGGLVKPGGSLRLSCAAS;
VH FR2:
(SEQ ID NO: 412)
MNWVRQAPGKGLEWVSS;
VH FR3:
(SEQ ID NO: 413)
YYADSVKGRFTISRDNAKNSLYLQMNSLRAEDTAVYYC;
and
VH FR4:
(SEQ ID NO: 414)
WGQGTLVTVSS.

[0093] The four FRs of the ABTx030 antibody VL region are as follows:

VL FR1:
(SEQ ID NO: 415)
EIVMTQSPSSLSASVGDRVTITCRAS;
VL FR2:
(SEQ ID NO: 416)
LNWYQQKPGKAPKLLIY;
VL FR3:
(SEQ ID NO: 417)
SLQSGVPSRFSGSGSGTDFTLTISSLQPEDFATYYC;
and
VL FR4:
(SEQ ID NO: 418)
FGGGTKVDIKRTV.

[0094] By “ABTx030 polynucleotide” is meant a nucleic acid molecule (e.g., DNA) encoding at least a fragment of an ABTx030 antibody. In an embodiment, the encoded fragment has antigen binding activity.

[0095] By “ABTx052” or “mAb-7” is meant an antibody having at least about 85% amino acid sequence identity to an antibody sequence of antibody ABTx052 or comprising VH and/or VL CDRs 1-3 of ABTx052 or antigen binding fragments thereof, wherein each of the antibody, CDRs, and antigen binding fragments specifically bind to a wild type CD117 polypeptide but fail to detectably bind or have only reduced binding to an altered CD117 polypeptide. In embodiments, the antibody or antigen binding fragment thereof has at least 90%, 93%, 95%, 98%, 99% or 100% amino acid sequence identity to an antibody sequence of antibody ABTx052.

[0096] Exemplary heavy chain and light chain sequences for antibody ABTx052 are provided below, where embodiments of the variable regions are in plain text, embodiments of the constant domains are in bold, and embodiments of complementarity determining regions (CDRs), i.e., CDR1, CDR2, and CDR2, are underlined:

ABTx052 heavy chain (HC):
(SEQ ID NO: 419)
QVQLVQSGAAVKKPGESLKISCKGSGYRFTSYWIGWVRQMPGKGLEWMG
IIYPGDSDTRYSPSFQGQVTISAGKSISTAYLQWSSLKASDTAMYYCAR
HGRGYNGYEGAFDIWGQGTMVTVSSASTKGPSVFPLAPSSKSTSGGTAA
LGCLVKDYFPEPVTVSWNSGALTSGVHTFPAVLQSSGLYSLSSVVTVPS
SSLGTQTYICNVNHKPSNTKVDKKVEPKSCDKTHTCPPCPAPELLGGPS
VFLFPPKPKDTLMISRTPEVTCVVVDVSHEDPEVKFNWYVDGVEVHNAK
TKPREEQYNSTYRVVSVLTVLHQDWLNGKEYKCKVSNKALPAPIEKTIS
KAKGQPREPQVYTLPPSRDELTKNQVSLTCLVKGFYPSDIAVEWESNGQ
PENNYKTTPPVLDSDGSFFLYSKLTVDKSRWQQGNVFSCSVMHEALHNH
YTQKSLSLSPG
ABTx052 light chain (LC):
(SEQ ID NO: 420)
AIQLTQSPSSLSASVGDRVTITCRASQGISSALAWYQQKPGKAPKLLIY
DASSLESGVPSRFSGSGSGTDFTLTISSLQPEDFATYYCQQFNSYPLTF
GGGTKVEIKRTVAAPSVFIFPPSDEQLKSGTASVVCLLNNFYPREAKVQ
WKVDNALQSGNSQESVTEQDSKDSTYSLSSTLTLSKADYEKHKVYACEV
THQGLSSPVTKSFNRGEC.

[0097] The three CDRs of the ABTx052 antibody VH region are as follows:

(SEQ ID NO: 421)
VH CDR1: GYRFTSYW;
(SEQ ID NO: 422)
VH CDR2: IYPGDSDT
or
(SEQ ID NO: 958)
IYPGDSDTR;
and
(SEQ ID NO: 423)
VH CDR3: ARHGRGYNGYEGAFDI.

[0098] The three CDRs of the ABTx052 antibody VL region are as follows:

(SEQ ID NO: 424)
VL CDR1: QGISSA;
VL CDR2: DAS;
and
(SEQ ID NO: 425)
VL CDR3: QQFNSYPLT.

[0099] The four framework (FR) regions, i.e., FR1, FR2, FR3, and FR4, of the ABTx052 antibody are located on either side of each of the CDRs in VH and VL region sequences shown supra. In particular, the four FRs of the ABTx052 antibody VH region are as follows:

(SEQ ID NO: 426)
VH FR1: QVQLVQSGAAVKKPGESLKISCKGS;
(SEQ ID NO: 427)
VH FR2: IGWVRQMPGKGLEWMGI;
and
(SEQ ID NO: 428)
VH FR3: RYSPSFQGQVTISAGKSISTAYLQWSSLKASDTAMYYC
or
(SEQ ID NO: 973)
YSPSFQGQVTISAGKSISTAYLQWSSLKASDTAMYYC;
(SEQ ID NO: 429)
VH FR4: WGQGTMVTVSS.

[0100] The four FRs of the ABTx052 antibody VL region are as follows:

(SEQ ID NO: 430)
VL FR1: AIQLTQSPSSLSASVGDRVTITCRAS;
(SEQ ID NO: 431)
VL FR2: LAWYQQKPGKAPKLLIY;
(SEQ ID NO: 432)
VL FR3: SLESGVPSRFSGSGSGTDFTLTISSLQPEDFATYYC;
and
(SEQ ID NO: 433)
VL FR4: FGGGTKVEIKRTV.

[0101] By “ABTx052 polynucleotide” is meant a nucleic acid molecule (e.g., DNA) encoding at least a fragment of an ABTx052 antibody. In an embodiment, the encoded fragment has antigen binding activity.

[0102] By “ABTx061” is meant an antibody having at least about 85% amino acid sequence identity to an antibody sequence of antibody ABTx061 or comprising VH and/or VL CDRs 1-3 of ABTx061 or antigen binding fragments thereof, wherein each of the antibody, CDRs, and antigen binding fragments specifically bind to a wild type CD117 polypeptide but fail to detectably bind or have only reduced binding to an altered CD117 polypeptide. In embodiments, the antibody or antigen binding fragment thereof has at least 90%, 93%, 95%, 98%, 99% or 100% amino acid sequence identity to an antibody sequence of antibody ABTx061. Exemplary heavy chain and light chain sequences for antibody ABTx061 are provided below, where the variable regions are in plain text, the constant domains are in bold, and complementarity determining regions (CDRs), i.e., CDR1, CDR2, and CDR2, are underlined:

ABTx061 heavy chain (HC):
(SEQ ID NO: 434)
EVQLVESGGGLVQPGRSLRLSCAASGFTFDDYAMHWVRQAPGKGLEWVSG
ISWNSGSIGYADSVKGRFTISRDNAKNSLYLQMNSLRAEDTALYYCAKDT
PLGYCSTTSCYGAFDIWGQGTMVTVSSASTKGPSVFPLAPSSKSTSGGTA
ALGCLVKDYFPEPVTVSWNSGALTSGVHTFPAVLQSSGLYSLSSVVTVPS
SSLGTQTYICNVNHKPSNTKVDKKVEPKSCDKTHTCPPCPAPELLGGPSV
FLFPPKPKDTLMISRTPEVTCVVVDVSHEDPEVKFNWYVDGVEVHNAKTK
PREEQYNSTYRVVSVLTVLHQDWLNGKEYKCKVSNKALPAPIEKTISKAK
GQPREPQVYTLPPSRDELTKNQVSLTCLVKGFYPSDIAVEWESNGQPENN
YKTTPPVLDSDGSFFLYSKLTVDKSRWQQGNVFSCSVMHEALHNHYTQKS
LSLSPGK
ABTx061 light chain (LC):
(SEQ ID NO: 435)
EIVLAQSPGTLSLSPGERATLSCRASQSVSSSYLAWYQQKPGQAPRLLIY
GASSRATGIPDRFSGSGSGTDFTLTISRLEPEDFAVYYCQQYGSSPLTFG
GGTKLEIKRTVAAPSVFIFPPSDEQLKSGTASVVCLLNNFYPREAKVQWK
VDNALQSGNSQESVTEQDSKDSTYSLSSTLTLSKADYEKHKVYACEVTHQ
GLSSPVTKSFNRGEC.

[0103] The three CDRs of the ABTx061 antibody VH region are as follows:

(SEQ ID NO: 436)
VH CDR1: GFTFDDYA;
(SEQ ID NO: 437)
VH CDR2: ISWNSGSI
or
ISWNSGSIG;
(SEQ ID NO: 1115)
and
(SEQ ID NO: 438)
VH CDR3: AKDTPLGYCSTTSCYGAFDI.

[0104] The three CDRs of the ABTx061 antibody VL region are as follows:

(SEQ ID NO: 439)
VL CDR1: QSVSSSY;
VL CDR2: GAS;
and
(SEQ ID NO: 440)
VL CDR3: QQYGSSPLT.

[0105] The four framework (FR) regions, i.e., FR1, FR2, FR3, and FR4, of the ABTx061 antibody are located on either side of each of the CDRs in VH and VL region sequences shown supra. In particular, the four FRs of the ABTx061 antibody VH region are as follows:

(SEQ ID NO: 441)
VH FR1: EVQLVESGGGLVQPGRSLRLSCAA;
(SEQ ID NO: 442)
VH FR2: MHWVRQAPGKGLEWVSG;
(SEQ ID NO: 443)
VH FR3: GYADSVKGRFTISRDNAKNSLYLQMNSLRAEDTALYYC
or
(SEQ ID NO: 1116)
YADSVKGRFTISRDNAKNSLYLQMNSLRAEDTALYYC;
and
(SEQ ID NO: 444)
VH FR4: WGQGTMVTVSS.

[0106] The four FRs of the ABTx061 antibody VL region are as follows:

(SEQ ID NO: 445)
VL FR1: EIVLAQSPGTLSLSPGERATLSCRAS;
(SEQ ID NO: 446)
VL FR2: LAWYQQKPGQAPRLLIY;
(SEQ ID NO: 447)
VL FR3: [sequence omitted];
and
(SEQ ID NO: 448)
VL FR4: FGGGTKLEIKRTV.

[0107] By “ABTx061 polynucleotide” is meant a nucleic acid molecule (e.g., DNA) encoding at least a fragment of an ABTx061 antibody. In an embodiment, the encoded fragment has antigen binding activity.

[0108] By “ABTx062” is meant an antibody having at least about 85% amino acid sequence identity to an antibody sequence of antibody ABTx062 or comprising VH and/or VL CDRs 1-3 of ABTx062 or antigen binding fragments thereof, wherein each of the antibody, CDRs, and antigen binding fragments specifically bind to a wild type CD117 polypeptide but fail to detectably bind or have only reduced binding to an altered CD117 polypeptide. In embodiments, the antibody or antigen binding fragment thereof has at least 90%, 93%, 95%, 98%, 99% or 100% amino acid sequence identity to an antibody sequence of antibody ABTx062. Exemplary heavy chain and light chain sequences for antibody ABTx062 are provided below, where the variable regions are in plain text, the constant domains are in bold, and complementarity determining regions (CDRs), i.e., CDR1, CDR2, and CDR2, are underlined:

ABTx062 heavy chain (HC):
(SEQ ID NO: 449)
EVQLVESGGGLVQPGRSLRLSCSASGFTFDDYAMHWVRQAPGKGLEWVSG
ISWNSGTIGYADSVKGRFTISRDNAKNSLYLQMNSLRAEDTALYYCAKDS
PPGYCSSASCYGAFDIWGQGTTVTVSSASTKGPSVFPLAPSSKSTSGGTA
ALGCLVKDYFPEPVTVSWNSGALTSGVHTFPAVLQSSGLYSLSSVVTVPS
SSLGTQTYICNVNHKPSNTKVDKKVEPKSCDKTHTCPPCPAPELLGGPSV
FLFPPKPKDTLMISRTPEVTCVVVDVSHEDPEVKFNWYVDGVEVHNAKTK
PREEQYNSTYRVVSVLTVLHQDWLNGKEYKCKVSNKALPAPIEKTISKAK
GQPREPQVYTLPPSRDELTKNQVSLTCLVKGFYPSDIAVEWESNGQPENN
YKTTPPVLDSDGSFFLYSKLTVDKSRWQQGNVFSCSVMHEALHNHYTQKS
LSLSPGK
ABTx062 light chain (LC):
(SEQ ID NO: 450)
DIQLTQSPSSLSASVGDRVTITCRASQSISSYLNWYQQKPGKAPKLLIYA
ASSLQSGVPSRFSGSGSGTDFTLTINSLQPEDFATYYCQQSYSTPFTFGP
GTKVEIKRTVAAPSVFIFPPSDEQLKSGTASVVCLLNNFYPREAKVQWKV
DNALQSGNSQESVTEQDSKDSTYSLSSTLTLSKADYEKHKVYACEVTHQG
LSSPVTKSFNRGEC.

[0109] The three CDRs of the ABTx062 antibody VH region are as follows:

(SEQ ID NO: 451)
VH CDR1: GFTFDDYA;
(SEQ ID NO: 452)
VH CDR2: ISWNSGTI;
and
(SEQ ID NO: 453)
VH CDR3: AKDSPPGYCSSASCYGAFDI.

[0110] The three CDRs of the ABTx062 antibody VL region are as follows:

(SEQ ID NO: 454)
VL CDR1: QSISSY;
VL CDR2: AAS;
and
(SEQ ID NO: 455)
VL CDR3: QQSYSTPFT.

[0111] The four framework (FR) regions, i.e., FR1, FR2, FR3, and FR4, of the ABTx062 antibody are located on either side of each of the CDRs in VH and VL region sequences shown supra. In particular, the four FRs of the ABTx062 antibody VH region are as follows:

(SEQ ID NO: 456)
VH FR1: EVQLVESGGGLVQPGRSLRLSCSAS;
(SEQ ID NO: 457)
VH FR2: MHWVRQAPGKGLEWVSG;
(SEQ ID NO: 458)
VH FR3: GYADSVKGRFTISRDNAKNSLYLQMNSLRAEDTALYYC
or
(SEQ ID NO: 1116)
YADSVKGRFTISRDNAKNSLYLQMNSLRAEDTALYYC;
and
(SEQ ID NO: 459)
VH FR4: WGQGTTVTVSS.

[0112] The four FRs of the ABTx062 antibody VL region are as follows:

(SEQ ID NO: 460)
VL FR1: [sequence omitted];
(SEQ ID NO: 461)
VL FR2: LNWYQQKPGKAPKLLIY;
(SEQ ID NO: 462)
VL FR3: SLQSGVPSRFSGSGSGTDFTLTINSLQPEDFATYYC;
and
(SEQ ID NO: 463)
VL FR4: FGPGTKVEIKRTV.

[0113] By “ABTx062 polynucleotide” is meant a nucleic acid molecule (e.g., DNA) encoding at least a fragment of an ABTx062 antibody. In an embodiment, the encoded fragment has antigen binding activity.

[0114] By “ABTx070” is meant an antibody having at least about 85% amino acid sequence identity to an antibody sequence of antibody ABTx070 or comprising VH and/or VL CDRs 1-3 of ABTx070 or antigen binding fragments thereof, wherein each of the antibody, CDRs, and antigen binding fragments specifically bind to a wild type CD117 polypeptide but fail to detectably bind or have only reduced binding to an altered CD117 polypeptide. In embodiments, the antibody or antigen binding fragment thereof has at least 90%, 93%, 95%, 98%, 99% or 100% amino acid sequence identity to an antibody sequence of antibody ABTx070. Exemplary heavy chain and light chain sequences for antibody ABTx070 are provided below, where the variable regions are in plain text, the constant domains are in bold, and complementarity determining regions (CDRs), i.e., CDR1, CDR2, and CDR2, are underlined:

ABTx070 heavy chain (HC):
(SEQ ID NO: 464)
EVQLVESGGGVVRPGGSLRLSCAASGFTFDDYGMSWVRQAPGKGLEWVSD
INWNGGSTGYADSVKGRFTISRDNAKNSLYLQMNSLRAEDTALYYCARES
WDGSGIYYMDVWGKGTTVTVSSASTKGPSVFPLAPSSKSTSGGTAALGCL
VKDYFPEPVTVSWNSGALTSGVHTFPAVLQSSGLYSLSSVVTVPSSSLGT
QTYICNVNHKPSNTKVDKKVEPKSCDKTHTCPPCPAPELLGGPSVFLFPP
KPKDTLMISRTPEVTCVVVDVSHEDPEVKFNWYVDGVEVHNAKTKPREEQ
YNSTYRVVSVLTVLHQDWLNGKEYKCKVSNKALPAPIEKTISKAKGQPRE
PQVYTLPPSRDELTKNQVSLTCLVKGFYPSDIAVEWESNGQPENNYKTTP
PVLDSDGSFFLYSKLTVDKSRWQQGNVFSCSVMHEALHNHYTQKSLSLSP
GK
ABTx070 light chain (LC):
(SEQ ID NO: 465)
DIVMTQSPSFLSASVGDRVTITCRASQGISSYLNWYQQKPGKAPKLLIYA
ASTLQNGVPSRFSGSGSGTDFTLTISSLQPEDFATYYCQQSYSTPITFGQ
GTRLEIKRTVAAPSVFIFPPSDEQLKSGTASVVCLLNNFYPREAKVQWKV
DNALQSGNSQESVTEQDSKDSTYSLSSTLTLSKADYEKHKVYACEVTHQG
LSSPVTKSFNRGEC.

[0115] The three CDRs of the ABTx070 antibody VH region are as follows:

(SEQ ID NO: 466)
VH CDR1: GFTFDDYG;
(SEQ ID NO: 467)
VH CDR2: INWNGGST
or
(SEQ ID NO: 1114)
INWNGGSTG;
and
(SEQ ID NO: 468)
VH CDR3: ARESWDGSGIYYMDV.

[0116] The three CDRs of the ABTx070 antibody VL region are as follows:

(SEQ ID NO: 469)
VL CDR1: QGISSY;
VL CDR2: AAS;
and
(SEQ ID NO: 470)
VL CDR3: QQSYSTPIT.

[0117] The four framework (FR) regions, i.e., FR1, FR2, FR3, and FR4, of the ABTx070 antibody are located on either side of each of the CDRs in VH and VL region sequences shown supra. In particular, the four FRs of the ABTx070 antibody VH region are as follows:

(SEQ ID NO: 471)
VH FR1: EVQLVESGGGVVRPGGSLRLSCAAS;
(SEQ ID NO: 472)
VH FR2: MSWVRQAPGKGLEWVSD;
(SEQ ID NO: 473)
VH FR3: GYADSVKGRFTISRDNAKNSLYLQMNSLRAEDTALYYC
or
(SEQ ID NO: 1116)
YADSVKGRFTISRDNAKNSLYLQMNSLRAEDTALYYC;
and
(SEQ ID NO: 474)
VH FR4: WGKGTTVTVSS.

[0118] The four FRs of the ABTx070 antibody VL region are as follows:

(SEQ ID NO: 475)
VL FR1: DIVMTQSPSFLSASVGDRVTITCRAS;
(SEQ ID NO: 476)
VL FR2: LNWYQQKPGKAPKLLIY;
(SEQ ID NO: 477)
VL FR3: TLQNGVPSRFSGSGSGTDFTLTISSLQPEDFATYYC;
and
(SEQ ID NO: 478)
VL FR4: FGQGTRLEIKRTV.

[0119] By “ABTx070 polynucleotide” is meant a nucleic acid molecule (e.g., DNA) encoding at least a fragment of an ABTx070 antibody. In an embodiment, the encoded fragment has antigen binding activity.

[0120] By “ABTx071” is meant an antibody having at least about 85% amino acid sequence identity to an antibody sequence of antibody ABTx071 or comprising VH and/or VL CDRs 1-3 of ABTx071 or antigen binding fragments thereof, wherein each of the antibody, CDRs, and antigen binding fragments specifically bind to a wild type CD117 polypeptide but fail to detectably bind or have only reduced binding to an altered CD117 polypeptide. In embodiments, the antibody or antigen binding fragment thereof has at least 90%, 93%, 95%, 98%, 99% or 100% amino acid sequence identity to an antibody sequence of antibody ABTx071. Exemplary heavy chain and light chain sequences for antibody ABTx071 are provided below, where the variable regions are in plain text, the constant domains are in bold, and complementarity determining regions (CDRs), i.e., CDR1, CDR2, and CDR2, are underlined:

ABTx071 heavy chain (HC):
(SEQ ID NO: 479)
EVQLVESGGGVVRPGGSLRLSCAASGFTFDDYGMSWVRQAPGKGLEWVSG
INWNGGSTGYADSVKGRFTISRDNAKNSLHLQMNSLRAEDTALYYCARES
WNYEGYYYMDVWGKGTTVTVSSASTKGPSVFPLAPSSKSTSGGTAALGCL
VKDYFPEPVTVSWNSGALTSGVHTFPAVLQSSGLYSLSSVVTVPSSSLGT
QTYICNVNHKPSNTKVDKKVEPKSCDKTHTCPPCPAPELLGGPSVFLFPP
KPKDTLMISRTPEVTCVVVDVSHEDPEVKFNWYVDGVEVHNAKTKPREEQ
YNSTYRVVSVLTVLHQDWLNGKEYKCKVSNKALPAPIEKTISKAKGQPRE
PQVYTLPPSRDELTKNQVSLTCLVKGFYPSDIAVEWESNGQPENNYKTTP
PVLDSDGSFFLYSKLTVDKSRWQQGNVFSCSVMHEALHNHYTQKSLSLSP
GK
ABTx071 light chain (LC):
(SEQ ID NO: 480)
AIQMTQSPSFLSASVGDRVTITCRASQGISSYLAWYQQKPGKAPKLLIYA
ASTLQNGVPSRFSGSGSGTEFTLTISSLQPEDFATYYCQQLNSYPYTFGQ
GTKLEIKRTVAAPSVFIFPPSDEQLKSGTASVVCLLNNFYPREAKVQWKV
DNALQSGNSQESVTEQDSKDSTYSLSSTLTLSKADYEKHKVYACEVTHQG
LSSPVTKSFNRGEC.

[0121] The three CDRs of the ABTx071 antibody VH region are as follows:

(SEQ ID NO: 481)
VH CDR1: GFTFDDYG;
(SEQ ID NO: 482)
VH CDR2: INWNGGST
or
(SEQ ID NO: 1114)
INWNGGSTG;
and
(SEQ ID NO: 483)
VH CDR3: ARESWNYEGYYYMDV.

[0122] The three CDRs of the ABTx071 antibody VL region are as follows:

(SEQ ID NO: 484)
VL CDR1: QGISSY;
VL CDR2: AAS;
and
(SEQ ID NO: 485)
VL CDR3: QQLNSYPYT.

[0123] The four framework (FR) regions, i.e., FR1, FR2, FR3, and FR4, of the ABTx071 antibody are located on either side of each of the CDRs in VH and VL region sequences shown supra. In particular, the four FRs of the ABTx071 antibody VH region are as follows:

(SEQ ID NO: 486)
VH FR1: EVQLVESGGGVVRPGGSLRLSCAAS;
(SEQ ID NO: 487)
VH FR2: MSWVRQAPGKGLEWVSG;
(SEQ ID NO: 488)
VH FR3: GYADSVKGRFTISRDNAKNSLHLQMNSLRAEDTALYYC
or
(SEQ ID NO: 1117)
YADSVKGRFTISRDNAKNSLHLQMNSLRAEDTALYYC;
and
(SEQ ID NO: 489)
VH FR4: WGKGTTVTVSS.

[0124] The four FRs of the ABTx071 antibody VL region are as follows:

(SEQ ID NO: 490)
VL FR1: AIQMTQSPSFLSASVGDRVTITCRAS;
(SEQ ID NO: 491)
VL FR2: LAWYQQKPGKAPKLLIY;
(SEQ ID NO: 492)
VL FR3: TLQNGVPSRFSGSGSGTEFTLTISSLQPEDFATYYC;
and
(SEQ ID NO: 493)
VL FR4: FGQGTKLEIKRTV.

[0125] By “ABTx071 polynucleotide” is meant a nucleic acid molecule (e.g., DNA) encoding at least a fragment of an ABTx071 antibody. In an embodiment, the encoded fragment has antigen binding activity.

[0126] By “ABTx248” is meant an antibody having at least about 85% amino acid sequence identity to an antibody sequence of antibody ABTx248 or comprising VH and/or VL CDRs 1-3 of ABTx248 or antigen binding fragments thereof, wherein each of the antibody, CDRs, and antigen binding fragments specifically bind to a wild type CD117 polypeptide but fail to detectably bind or have only reduced binding to an altered CD117 polypeptide. In embodiments, the antibody or antigen binding fragment thereof has at least 90%, 93%, 95%, 98%, 99% or 100% amino acid sequence identity to an antibody sequence of antibody ABTx248. Exemplary heavy chain and light chain sequences for antibody ABTx248 are provided below, where the variable regions are in plain text, the constant domains are in bold, and complementarity determining regions (CDRs), i.e., CDR1, CDR2, and CDR2, are underlined:

ABTx248 heavy chain (HC):
(SEQ ID NO: 1011)
QVQLVQSGAAVKKPGESLKISCKGSGYRFTSYWIGWVRQMPGKGLEWMGI
IYPGDSDTRYSPSFQGQVTISAGKSISTAYLQWSSLKASDTAMYYCARHG
RGYDGYDGAFDIWGQGTMVTVSSASTKGPSVFPLAPSSKSTSGGTAALGC
LVKDYFPEPVTVSWNSGALTSGVHTFPAVLQSSGLYSLSSVVTVPSSSLG
TQTYICNVNHKPSNTKVDKKVEPKSCDKTHTCPPCPAPELLGGPSVFLFP
PKPKDTLMISRTPEVTCVVVDVSHEDPEVKFNWYVDGVEVHNAKTKPREE
QYNSTYRVVSVLTVLHQDWLNGKEYKCKVSNKALPAPIEKTISKAKGQPR
EPQVYTLPPSRDELTKNQVSLTCLVKGFYPSDIAVEWESNGQPENNYKTT
PPVLDSDGSFFLYSKLTVDKSRWQQGNVFSCSVMHEALHNHYTQKSLSLS
PG
ABTx248 light chain (LC):
(SEQ ID NO: 420)
AIQLTQSPSSLSASVGDRVTITCRASQGISSALAWYQQKPGKAPKLLIYD
ASSLESGVPSRFSGSGSGTDFTLTISSLQPEDFATYYCQQFNSYPLTFGG
GTKVEIKRTVAAPSVFIFPPSDEQLKSGTASVVCLLNNFYPREAKVQWKV
DNALQSGNSQESVTEQDSKDSTYSLSSTLTLSKADYEKHKVYACEVTHQG
LSSPVTKSFNRGEC.

[0127] The three CDRs of the ABTx248 antibody VH region are as follows:

(SEQ ID NO: 421)
VH CDR1: GYRFTSYW;
(SEQ ID NO: 958)
VH CDR2: IYPGDSDTR;
and
(SEQ ID NO: 1012)
VH CDR3: ARHGRGYDGYDGAFDI.

[0128] The three CDRs of the ABTx248 antibody VL region are as follows:

(SEQ ID NO: 424)
VL CDR1: QGISSA;
VL CDR2: DAS;
and
(SEQ ID NO: 425)
VL CDR3: QQFNSYPLT.

[0129] The four framework (FR) regions, i.e., FR1, FR2, FR3, and FR4, of the ABTx248 antibody are located on either side of each of the CDRs in VH and VL region sequences shown supra. In particular, the four FRs of the ABTx248 antibody VH region are as follows:

(SEQ ID NO: 426)
VH FR1: QVQLVQSGAAVKKPGESLKISCKGS;
(SEQ ID NO: 427)
VH FR2: IGWVRQMPGKGLEWMGI;
and
(SEQ ID NO: 428)
VH FR3: RYSPSFQGQVTISAGKSISTAYLQWSSLKASDTAMYYC
or
(SEQ ID NO: 973)
YSPSFQGQVTISAGKSISTAYLQWSSLKASDTAMYYC;
(SEQ ID NO: 429)
VH FR4: WGQGTMVTVSS.

[0130] The four FRs of the ABTx248 antibody VL region are as follows:

(SEQ ID NO: 430)
VL FR1: AIQLTQSPSSLSASVGDRVTITCRAS;
(SEQ ID NO: 431)
VL FR2: LAWYQQKPGKAPKLLIY;
(SEQ ID NO: 432)
VL FR3: SLESGVPSRFSGSGSGTDFTLTISSLQPEDFATYYC;
and
(SEQ ID NO: 433)
VL FR4: FGGGTKVEIKRTV.

[0131] By “ABTx248 polynucleotide” is meant a nucleic acid molecule (e.g., DNA) encoding at least a fragment of an ABTx248 antibody. In an embodiment, the encoded fragment has antigen binding activity.

[0132] By “ABTx249” is meant an antibody having at least about 85% amino acid sequence identity to an antibody sequence of antibody ABTx249 or comprising VH and/or VL CDRs 1-3 of ABTx249 or antigen binding fragments thereof, wherein each of the antibody, CDRs, and antigen binding fragments specifically bind to a wild type CD117 polypeptide but fail to detectably bind or have only reduced binding to an altered CD117 polypeptide. In embodiments, the antibody or antigen binding fragment thereof has at least 90%, 93%, 95%, 98%, 99% or 100% amino acid sequence identity to an antibody sequence of antibody ABTx249. Exemplary heavy chain and light chain sequences for antibody ABTx249 are provided below, where the variable regions are in plain text, the constant domains are in bold, and complementarity determining regions (CDRs), i.e., CDR1, CDR2, and CDR2, are underlined:

ABTx249 heavy chain (HC):
(SEQ ID NO: 1013)
QVQLVQSGAAVKKPGESLKISCKGSGYRFTSYWIGWVRQMPGKGLEWMGI
IYPGDSDTRYSPSFQGQVTISAGKSISTAYLQWSSLKASDTAMYYCARHG
RGYDGYEGAFDIWGQGTMVTVSSASTKGPSVFPLAPSSKSTSGGTAALGC
LVKDYFPEPVTVSWNSGALTSGVHTFPAVLQSSGLYSLSSVVTVPSSSLG
TQTYICNVNHKPSNTKVDKKVEPKSCDKTHTCPPCPAPELLGGPSVFLFP
PKPKDTLMISRTPEVTCVVVDVSHEDPEVKFNWYVDGVEVHNAKTKPREE
QYNSTYRVVSVLTVLHQDWLNGKEYKCKVSNKALPAPIEKTISKAKGQPR
EPQVYTLPPSRDELTKNQVSLTCLVKGFYPSDIAVEWESNGQPENNYKTT
PPVLDSDGSFFLYSKLTVDKSRWQQGNVFSCSVMHEALHNHYTQKSLSLS
PG
ABTx249 light chain (LC):
(SEQ ID NO: 1014)
AIQLTQSPSSLSASVGDRVTITCRASQGISSALAWYQQKPGKAPKLLIYD
ASSLESGVPSRFSGSGSGTDFTLTISSLQPEDFATYYCQQLNGYPLTFGG
GTKVEIKRTVAAPSVFIFPPSDEQLKSGTASVVCLLNNFYPREAKVQWKV
DNALQSGNSQESVTEQDSKDSTYSLSSTLTLSKADYEKHKVYACEVTHQG
LSSPVTKSFNRGEC.

[0133] The three CDRs of the ABTx249 antibody VH region are as follows:

VH CDR1:
(SEQ ID NO: 421)
GYRFTSYW;
VH CDR2:
(SEQ ID NO: 958)
IYPGDSDTR;
and
VH CDR3:
(SEQ ID NO: 948)
ARHGRGYDGYEGAFDI.

[0134] The three CDRs of the ABTx249 antibody VL region are as follows:

VL CDR1:
(SEQ ID NO: 424)
QGISSA;
VL CDR2:
DAS;
and
VL CDR3:
(SEQ ID NO: 1015)
QQLNGYPLT.

[0135] The four framework (FR) regions, i.e., FR1, FR2, FR3, and FR4, of the ABTx249 antibody are located on either side of each of the CDRs in VH and VL region sequences shown supra. In particular, the four FRs of the ABTx249 antibody VH region are as follows:

VH FR1:
(SEQ ID NO: 426)
QVQLVQSGAAVKKPGESLKISCKGS;
VH FR2:
(SEQ ID NO: 427)
IGWVRQMPGKGLEWMGI;
and
VH FR3:
(SEQ ID NO: 428)
RYSPSFQGQVTISAGKSISTAYLQWSSLKASDTAMYYC
or
(SEQ ID NO: 973)
YSPSFQGQVTISAGKSISTAYLQWSSLKASDTAMYYC;
VH FR4:
(SEQ ID NO: 429)
WGQGTMVTVSS.

[0136] The four FRs of the ABTx249 antibody VL region are as follows:

VL FR1:
(SEQ ID NO: 430)
AIQLTQSPSSLSASVGDRVTITCRAS;
VL FR2:
(SEQ ID NO: 431)
LAWYQQKPGKAPKLLIY;
VL FR3:
(SEQ ID NO: 432)
SLESGVPSRFSGSGSGTDFTLTISSLQPEDFATYYC;
and
VL FR4:
(SEQ ID NO: 433)
FGGGTKVEIKRTV.

[0137] By “ABTx249 polynucleotide” is meant a nucleic acid molecule (e.g., DNA) encoding at least a fragment of an ABTx249 antibody. In an embodiment, the encoded fragment has antigen binding activity.

[0138] By “ABTx250” is meant an antibody having at least about 85% amino acid sequence identity to an antibody sequence of antibody ABTx250 or comprising VH and/or VL CDRs 1-3 of ABTx250 or antigen binding fragments thereof, wherein each of the antibody, CDRs, and antigen binding fragments specifically bind to a wild type CD117 polypeptide but fail to detectably bind or have only reduced binding to an altered CD117 polypeptide. In embodiments, the antibody or antigen binding fragment thereof has at least 90%, 93%, 95%, 98%, 99% or 100% amino acid sequence identity to an antibody sequence of antibody ABTx250. Exemplary heavy chain and light chain sequences for antibody ABTx250 are provided below, where the variable regions are in plain text, the constant domains are in bold, and complementarity determining regions (CDRs), i.e., CDR1, CDR2, and CDR2, are underlined:

ABTx250 heavy chain (HC):
(SEQ ID NO: 1016)
QVQLVQSGAAVKKPGESLKISCKGSGYRFTSYWIGWVRQMPGKGL
EWMGIIYPGDSDTKYSPSFQGQVTISAGKSISTAYLQWSSLKASD
TAMYYCARHGRGYDGYEGAFDIWGQGTMVTVSSASTKGPSVFPLA
PSSKSTSGGTAALGCLVKDYFPEPVTVSWNSGALTSGVHTFPAVL
QPSGLYSLSSVVTVPSSSLGTQTYICNVNHKPSNTKVDKKVEPKS
CDKTHTCPPCPAPELLGGPSVFLFPPKPKDTLMISRTPEVTCVVV
DVSHEDPEVKFNWYVDGVEVHNAKTKPREEQYNSTYRVVSVLTVL
HQDWLNGKEYKCKVSNKALPAPIEKTISKAKGQPREPQVYTLPPS
RDELTKNQVSLTCLVKGFYPSDIAVEWESNGQPENNYKTTPPVLD
SDGSFFLYSKLTVDKSRWQQGNVFSCSVMHEALHNHYTQKSLSLS
PG
ABTx250 light chain (LC):
(SEQ ID NO: 420)
AIQLTQSPSSLSASVGDRVTITCRASQGISSALAWYQQKPGKAPK
LLIYDASSLESGVPSRFSGSGSGTDFTLTISSLQPEDFATYYCQQ
FNSYPLTFGGGTKVEIKRTVAAPSVFIFPPSDEQLKSGTASVVCL
LNNFYPREAKVQWKVDNALQSGNSQESVTEQDSKDSTYSLSSTLT
LSKADYEKHKVYACEVTHQGLSSPVTKSFNRGEC.

[0139] The three CDRs of the ABTx250 antibody VH region are as follows:

VH CDR1:
(SEQ ID NO: 421)
GYRFTSYW;
VH CDR2:
(SEQ ID NO: 972)
IYPGDSDTK;
and
VH CDR3:
(SEQ ID NO: 948)
ARHGRGYDGYEGAFDI.
The three CDRs of the ABTx250 antibody
VL region are as follows:
VL CDR1:
(SEQ ID NO: 424)
QGISSA;
VL CDR2:
DAS;
and
VL CDR3:
(SEQ ID NO: 425)
QQFNSYPLT.

[0140] The four framework (FR) regions, i.e., FR1, FR2, FR3, and FR4, of the ABTx250 antibody are located on either side of each of the CDRs in VH and VL region sequences shown supra. In particular, the four FRs of the ABTx250 antibody VH region are as follows:

VH FR1:
(SEQ ID NO: 426)
QVQLVQSGAAVKKPGESLKISCKGS;
VH FR2:
(SEQ ID NO: 427)
IGWVRQMPGKGLEWMGI;
and
VH FR3:
(SEQ ID NO: 428)
RYSPSFQGQVTISAGKSISTAYLQWSSLKASDTAMYYC
or
(SEQ ID NO: 973)
YSPSFQGQVTISAGKSISTAYLQWSSLKASDTAMYYC;
VH FR4:
(SEQ ID NO: 429)
WGQGTMVTVSS.

[0141] The four FRs of the ABTx250 antibody VL region are as follows:

VL FR1:
(SEQ ID NO: 430)
AIQLTQSPSSLSASVGDRVTITCRAS;
VL FR2:
(SEQ ID NO: 431)
LAWYQQKPGKAPKLLIY;
VL FR3:
(SEQ ID NO: 432)
SLESGVPSRFSGSGSGTDFTLTISSLQPEDFATYYC;
and
VL FR4:
(SEQ ID NO: 433)
FGGGTKVEIKRTV.

[0142] By “ABTx250 polynucleotide” is meant a nucleic acid molecule (e.g., DNA) encoding at least a fragment of an ABTx250 antibody. In an embodiment, the encoded fragment has antigen binding activity.

[0143] By “ABTx251” is meant an antibody having at least about 85% amino acid sequence identity to an antibody sequence of antibody ABTx251 or comprising VH and/or VL CDRs 1-3 of ABTx251 or antigen binding fragments thereof, wherein each of the antibody, CDRs, and antigen binding fragments specifically bind to a wild type CD117 polypeptide but fail to detectably bind or have only reduced binding to an altered CD117 polypeptide. In embodiments, the antibody or antigen binding fragment thereof has at least 90%, 93%, 95%, 98%, 99% or 100% amino acid sequence identity to an antibody sequence of antibody ABTx251. Exemplary heavy chain and light chain sequences for antibody ABTx251 are provided below, where the variable regions are in plain text, the constant domains are in bold, and complementarity determining regions (CDRs), i.e., CDR1, CDR2, and CDR2, are underlined:

ABTx251 heavy chain (HC):
(SEQ ID NO: 1013)
QVQLVQSGAAVKKPGESLKISCKGSGYRFTSYWIGWVRQMPGKGL
EWMGIIYPGDSDTRYSPSFQGQVTISAGKSISTAYLQWSSLKASD
TAMYYCARHGRGYDGYEGAFDIWGQGTMVTVSSASTKGPSVFPLA
PSSKSTSGGTAALGCLVKDYFPEPVTVSWNSGALTSGVHTFPAVL
QPSGLYSLSSVVTVPSSSLGTQTYICNVNHKPSNTKVDKKVEPKS
CDKTHTCPPCPAPELLGGPSVFLFPPKPKDTLMISRTPEVTCVVV
DVSHEDPEVKFNWYVDGVEVHNAKTKPREEQYNSTYRVVSVLTVL
HQDWLNGKEYKCKVSNKALPAPIEKTISKAKGQPREPQVYTLPPS
RDELTKNQVSLTCLVKGFYPSDIAVEWESNGQPENNYKTTPPVLD
SDGSFFLYSKLTVDKSRWQQGNVFSCSVMHEALHNHYTQKSLSLS
PG
ABTx251 light chain (LC):
(SEQ ID NO: 1017)
AIQLTQSPSSLSASVGDRVTITCRASQGISSALAWYQQKPGKAPK
LLIYDASSLESGVPSRFSGSGSGTDFTLTISSLQPEDFATYYCQQ
FYSYPLTFGGGTKVEIKRTVAAPSVFIFPPSDEQLKSGTASVVCL
LNNFYPREAKVQWKVDNALQSGNSQESVTEQDSKDSTYSLSSTLT
LSKADYEKHKVYACEVTHQGLSSPVTKSFNRGEC.

[0144] The three CDRs of the ABTx251 antibody VH region are as follows:

VH CDR1:
(SEQ ID NO: 421)
GYRFTSYW;
VH CDR2:
(SEQ ID NO: 958)
IYPGDSDTR;
and
VH CDR3:
(SEQ ID NO: 948)
ARHGRGYDGYEGAFDI.

[0145] The three CDRs of the ABTx251 antibody VL region are as follows:

VL CDR1:
(SEQ ID NO: 424)
QGISSA;
VL CDR2:
DAS;
and
VL CDR3:
(SEQ ID NO: 954)
QQFYSYPLT.

[0146] The four framework (FR) regions, i.e., FR1, FR2, FR3, and FR4, of the ABTx251 antibody are located on either side of each of the CDRs in VH and VL region sequences shown supra. In particular, the four FRs of the ABTx251 antibody VH region are as follows:

VH FR1:
(SEQ ID NO: 426)
QVQLVQSGAAVKKPGESLKISCKGS;
VH FR2:
(SEQ ID NO: 427)
IGWVRQMPGKGLEWMGI;
and
VH FR3:
(SEQ ID NO: 428)
RYSPSFQGQVTISAGKSISTAYLQWSSLKASDTAMYYC
or
(SEQ ID NO: 973)
YSPSFQGQVTISAGKSISTAYLQWSSLKASDTAMYYC;
VH FR4:
(SEQ ID NO: 429)
WGQGTMVTVSS.

[0147] The four FRs of the ABTx251 antibody VL region are as follows:

VL FR1:
(SEQ ID NO: 430)
AIQLTQSPSSLSASVGDRVTITCRAS;
VL FR2:
(SEQ ID NO: 431)
LAWYQQKPGKAPKLLIY;
VL FR3:
(SEQ ID NO: 432)
SLESGVPSRFSGSGSGTDFTLTISSLQPEDFATYYC;
and
VL FR4:
(SEQ ID NO: 433)
FGGGTKVEIKRTV.

[0148] By “ABTx251 polynucleotide” is meant a nucleic acid molecule (e.g., DNA) encoding at least a fragment of an ABTx251 antibody. In an embodiment, the encoded fragment has antigen binding activity.

[0149] By “ABTx252” is meant an antibody having at least about 85% amino acid sequence identity to an antibody sequence of antibody ABTx252 or comprising VH and/or VL CDRs 1-3 of ABTx252 or antigen binding fragments thereof, wherein each of the antibody, CDRs, and antigen binding fragments specifically bind to a wild type CD117 polypeptide but fail to detectably bind or have only reduced binding to an altered CD117 polypeptide. In embodiments, the antibody or antigen binding fragment thereof has at least 90%, 93%, 95%, 98%, 99% or 100% amino acid sequence identity to an antibody sequence of antibody ABTx252. Exemplary heavy chain and light chain sequences for antibody ABTx252 are provided below, where the variable regions are in plain text, the constant domains are in bold, and complementarity determining regions (CDRs), i.e., CDR1, CDR2, and CDR2, are underlined:

ABTx252 heavy chain (HC):
(SEQ ID NO: 1013)
QVQLVQSGAAVKKPGESLKISCKGSGYRFTSYWIGWVRQMPGKGL
EWMGIIYPGDSDTRYSPSFQGQVTISAGKSISTAYLQWSSLKASD
TAMYYCARHGRGYDGYEGAFDIWGQGTMVTVSSASTKGPSVFPLA
PSSKSTSGGTAALGCLVKDYFPEPVTVSWNSGALTSGVHTFPAVL
QPSGLYSLSSVVTVPSSSLGTQTYICNVNHKPSNTKVDKKVEPKS
CDKTHTCPPCPAPELLGGPSVFLFPPKPKDTLMISRTPEVTCVVV
DVSHEDPEVKFNWYVDGVEVHNAKTKPREEQYNSTYRVVSVLTVL
HQDWLNGKEYKCKVSNKALPAPIEKTISKAKGQPREPQVYTLPPS
RDELTKNQVSLTCLVKGFYPSDIAVEWESNGQPENNYKTTPPVLD
SDGSFFLYSKLTVDKSRWQQGNVFSCSVMHEALHNHYTQKSLSLS
PG
ABTx252 light chain (LC):
(SEQ ID NO: 1018)
AIQLTQSPSSLSASVGDRVTITCRASQGISSALAWYQQKPGKAPK
LLIYDASSLESGVPSRFSGSGSGTDFTLTISSLQPEDFATYYCQQ
FNSHPLTFGGGTKVEIKRTVAAPSVFIFPPSDEQLKSGTASVVCL
LNNFYPREAKVQWKVDNALQSGNSQESVTEQDSKDSTYSLSSTLT
LSKADYEKHKVYACEVTHQGLSSPVTKSFNRGEC.

[0150] The three CDRs of the ABTx252 antibody VH region are as follows:

VH CDR1:
(SEQ ID NO: 421)
GYRFTSYW;
VH CDR2:
(SEQ ID NO: 958)
IYPGDSDTR;
and
VH CDR3:
(SEQ ID NO: 948)
ARHGRGYDGYEGAFDI.
The three CDRs of the ABTx252
antibody VL region are as follows:
VL CDR1:
(SEQ ID NO: 424)
QGISSA;
VL CDR2:
DAS;
and
VL CDR3:
(SEQ ID NO: 955)
QQFNSHPLT.

[0151] The four framework (FR) regions, i.e., FR1, FR2, FR3, and FR4, of the ABTx252 antibody are located on either side of each of the CDRs in VH and VL region sequences shown supra. In particular, the four FRs of the ABTx252 antibody VH region are as follows:

```
  (SEQ ID NO: 426)
VH FR1: QVQLVQSGAAVKKPGESLKISCKGS;
  (SEQ ID NO: 427)
VH FR2: IGWVRQMPGKGLEWMGI;
and
  (SEQ ID NO: 428)
VH FR3: RYSPSFQGQVTISAGKSISTAYLQWSSLKASDTAMYYC
or
  (SEQ ID NO: 973)
YSPSFQGQVTISAGKSISTAYLQWSSLKASDTAMYYC;
(SEQ ID NO: 429)
VH FR4: WGQGTMVTVSS
```

[0152] The four FRs of the ABTx252 antibody VL region are as follows:

```
  (SEQ ID NO: 430)
VL FR1: AIQLTQSPSSLSASVGDRVTITCRAS;
  (SEQ ID NO: 431)
VL FR2: LAWYQQKPGKAPKLLIY;
  (SEQ ID NO: 432)
VL FR3: SLESGVPSRFSGSGSGTDFTLTISSLQPEDFATYYC;
and
(SEQ ID NO: 433)
VL FR4: FGGGTKVEIKRTV.
```

[0153] By “ABTx252 polynucleotide” is meant a nucleic acid molecule (e.g., DNA) encoding at least a fragment of an ABTx252 antibody. In an embodiment, the encoded fragment has antigen binding activity.

[0154] By “ABTx253” is meant an antibody having at least about 85% amino acid sequence identity to an antibody sequence of antibody ABTx253 or comprising VH and/or VL CDRs 1-3 of ABTx253 or antigen binding fragments thereof, wherein each of the antibody, CDRs, and antigen binding fragments specifically bind to a wild type CD117 polypeptide but fail to detectably bind or have only reduced binding to an altered CD117 polypeptide. In embodiments, the antibody or antigen binding fragment thereof has at least 90%, 93%, 95%, 98%, 99% or 100% amino acid sequence identity to an antibody sequence of antibody ABTx253. Exemplary heavy chain and light chain sequences for antibody ABTx253 are provided below, where the variable regions are in plain text, the constant domains are in bold, and complementarity determining regions (CDRs), i.e., CDR1, CDR2, and CDR2, are underlined:

```
ABTx253 heavy chain (HC):
  (SEQ ID NO: 1013)
QVQLVQSGAAVKKPGESLKISCKGSGYRFTSYWIGWVRQMPGKGLEWMGIIYPGDSDTRYSPSF
QGQVTISAGKSISTAYLQWSSLKASDTAMYYCARHGRGYDGYEGAFDIWGQGTMVTVSSASTKG
PSVFPLAPSSKSTSGGTAALGCLVKDYFPEPVTVSWNSGALTSGVHTFPAVLQSSGLYSLSSVV
TVPSSSLGTQTYICNVNHKPSNTKVDKKVEPKSCDKTHTCPPCPAPELLGGPSVFLFPPKPKDT
LMISRTPEVTCVVVDVSHEDPEVKFNWYVDGVEVHNAKTKPREEQYNSTYRVVSVLTVLHQDWL
NGKEYKCKVSNKALPAPIEKTISKAKGQPREPQVYTLPPSRDELTKNQVSLTCLVKGFYPSDIA
VEWESNGQPENNYKTTPPVLDSDGSFFLYSKLTVDKSRWQQGNVFSCSVMHEALHNHYTOKSLS
LSPG
ABTx253 light chain (LC):
  (SEQ ID NO: 1019)
AIQLTQSPSSLSASVGDRVTITCRASQGISSALAWYQQKPGKAPKLLIYDASSLESGVPSRFSG
SGSGTDFTLTISSLQEDFATYYCQQFSSYPLTFGGGTKVEIKRTVAAPSVFIFPPSDEQLKSG
TASVVCLLNNFYPREAKVQWKVDNALQSGNSQESVTEQDSKDSTYSLSSTLTLSKADYEKHKVY
ACEVTHQGLSSPVTKSFNRGEC.
```

[0155] The three CDRs of the ABTx253 antibody VH region are as follows:

```
  (SEQ ID NO: 421)
VH CDR1: GYRFTSYW;
  (SEQ ID NO: 958)
VH CDR2: IYPGDSDTR;
and
(SEQ ID NO: 948)
VH CDR3: ARHGRGYDGYEGAFDI.
```

[0156] The three CDRs of the ABTx253 antibody VL region are as follows:

(SEQ ID NO: 424)
VL CDR1: QGISSA;
VL CDR2: DAS;
and
(SEQ ID NO: 1020)
VL CDR3: QQFSSYPLT.

[0157] The four framework (FR) regions, i.e., FR1, FR2, FR3, and FR4, of the ABTx253 antibody are located on either side of each of the CDRs in VH and VL region sequences shown supra. In particular, the four FRs of the ABTx253 antibody VH region are as follows:

```
  (SEQ ID NO: 426)
VH FR1: QVQLVQSGAAVKKPGESLKISCKGS;
  (SEQ ID NO: 427)
VH FR2: IGWVRQMPGKGLEWMGI;
and
  (SEQ ID NO: 428)
VH FR3: RYSPSFQGQVTISAGKSISTAYLQWSSLKASDTAMYYC
or
  (SEQ ID NO: 973)
YSPSFQGQVTISAGKSISTAYLQWSSLKASDTAMYYC;
(SEQ ID NO: 429)
VH FR4: WGQGTMVTVSS.
```

[0158] The four FRs of the ABTx253 antibody VL region are as follows:

```
  (SEQ ID NO: 430)
VL FR1: AIQLTQSPSSLSASVGDRVTITCRAS;
  (SEQ ID NO: 431)
VL FR2: LAWYQQKPGKAPKLLIY;
  (SEQ ID NO: 432)
VL FR3: SLESGVPSRFSGSGSGTDFTLTISSLOPEDFATYYC;
and
(SEQ ID NO: 433)
VL FR4: FGGGTKVEIKRTV.
```

[0159] By “ABTx253 polynucleotide” is meant a nucleic acid molecule (e.g., DNA) encoding at least a fragment of an ABTx253 antibody. In an embodiment, the encoded fragment has antigen binding activity.

[0160] By “ABTx254” is meant an antibody having at least about 85% amino acid sequence identity to an antibody sequence of antibody ABTx254 or comprising VH and/or VL CDRs 1-3 of ABTx254 or antigen binding fragments thereof, wherein each of the antibody, CDRs, and antigen binding fragments specifically bind to a wild type CD117 polypeptide but fail to detectably bind or have only reduced binding to an altered CD117 polypeptide. In embodiments, the antibody or antigen binding fragment thereof has at least 90%, 93%, 95%, 98%, 99% or 100% amino acid sequence identity to an antibody sequence of antibody ABTx254. Exemplary heavy chain and light chain sequences for antibody ABTx254 are provided below, where the variable regions are in plain text, the constant domains are in bold, and complementarity determining regions (CDRs), i.e., CDR1, CDR2, and CDR2, are underlined:

ABTx254 heavy chain (HC):
(SEQ ID NO: 1021)
QVQLVQSGAAVKKPGESLKISCKGSGYRFTSYWIGWVRQMPGKGLEWMGIIYPGDSDTKYSPSF
QGQVTISAGKSISTAYLQWSSLKASDTAMYYCARHGRGYDGYDGAFDIWGQGTMVTVSSASTKG
PSVFPLAPSSKSTSGGTAALGCLVKDYFPEPVTVSWNSGALTSGVHTFPAVLQSSGLYSLSSVV
TVPSSSLGTQTYICNVNHKPSNTKVDKKVEPKSCDKTHTCPPCPAPELLGGPSVFLFPPKPKDT
LMISRTPEVTCVVVDVSHEDPEVKFNWYVDGVEVHNAKTKPREEQYNSTYRVVSVLTVLHQDWL
NGKEYKCKVSNKALPAPIEKTISKAKGQPREPQVYTLPPSRDELTKNQVSLTCLVKGFYPSDIA
VEWESNGQPENNYKTTPPVLDSDGSFFLYSKLTVDKSRWQQGNVFSCSVMHEALHNHYTQKSLS
LSPG
ABTx254 light chain (LC):
(SEQ ID NO: 1022)
AIQLTQSPSSLSASVGDRVTITCRASQGISSALAWYQQKPGKAPKLLIYDASSLESGVPSRFSG
SGSGTDFTLTISSLQPEDFATYYCQQTNSHPLTFGGGTKVEIKRTVAAPSVFIFPPSDEQLKSG
TASVVCLLNNFYPREAKVQWKVDNALQSGNSQESVTEQDSKDSTYSLSSTLTLSKADYEKHKVY
ACEVTHQGLSSPVTKSENRGEC.

[0161] The three CDRs of the ABTx254 antibody VH region are as follows:

```
  (SEQ ID NO: 421)
VH CDR1: GYRFTSYW;
  (SEQ ID NO: 972)
VH CDR2: IYPGDSDTK;
and
(SEQ ID NO: 1012)
VH CDR3: ARHGRGYDGYDGAFDI
```

[0162] The three CDRs of the ABTx254 antibody VL region are as follows:

```
  (SEQ ID NO: 424)
VL CDR1: QGISSA;
VL CDR2: DAS;
and
  (SEQ ID NO: 1023)
VL CDR3: QQTNSHPLT.
```

[0163] The four framework (FR) regions, i.e., FR1, FR2, FR3, and FR4, of the ABTx254 antibody are located on either side of each of the CDRs in VH and VL region sequences shown supra. In particular, the four FRs of the ABTx254 antibody VH region are as follows:

```
  (SEQ ID NO: 426)
VH FR1: QVQLVQSGAAVKKPGESLKISCKGS;
  (SEQ ID NO: 427)
VH FR2: IGWVRQMPGKGLEWMGI;
and
  (SEQ ID NO: 428)
VH FR3: RYSPSFQGQVTISAGKSISTAYLQWSSLKASDTAMYYC
or
  (SEQ ID NO: 973)
YSPSFQGQVTISAGKSISTAYLQWSSLKASDTAMYYC;
(SEQ ID NO: 429)
VH FR4: WGQGTMVTVSS.
```

[0164] The four FRs of the ABTx254 antibody VL region are as follows:

(SEQ ID NO: 430)
VL FR1: AIQLTQSPSSLSASVGDRVTITCRAS;
(SEQ ID NO: 431)
VL FR2: LAWYQQKPGKAPKLLIY;
(SEQ ID NO: 432)
VL FR3: SLESGVPSRFSGSGSGTDFTLTISSLQPEDFATYYC;
and
(SEQ ID NO: 433)
VL FR4: FGGGTKVEIKRTV.

[0165] By “ABTx254 polynucleotide” is meant a nucleic acid molecule (e.g., DNA) encoding at least a fragment of an ABTx254 antibody. In an embodiment, the encoded fragment has antigen binding activity.

[0166] By “ABTx255” is meant an antibody having at least about 85% amino acid sequence identity to an antibody sequence of antibody ABTx255 or comprising VH and/or VL CDRs 1-3 of ABTx255 or antigen binding fragments thereof, wherein each of the antibody, CDRs, and antigen binding fragments specifically bind to a wild type CD117 polypeptide but fail to detectably bind or have only reduced binding to an altered CD117 polypeptide. In embodiments, the antibody or antigen binding fragment thereof has at least 90%, 93%, 95%, 98%, 99% or 100% amino acid sequence identity to an antibody sequence of antibody ABTx255. Exemplary heavy chain and light chain sequences for antibody ABTx255 are provided below, where the variable regions are in plain text, the constant domains are in bold, and complementarity determining regions (CDRs), i.e., CDR1, CDR2, and CDR2, are underlined:

ABTx255 heavy chain (HC):
(SEQ ID NO: 1016)
QVQLVQSGAAVKKPGESLKISCKGSGYRFTSYWIGWVRQMPGKGLEWMGIIYPGDSDTKYSPSF
QGQVTISAGKSISTAYLQWSSLKASDTAMYYCARHGRGYDGYEGAFDIWGQGTMVTVSSASTKG
PSVFPLAPSSKSTSGGTAALGCLVKDYFPEPVTVSWNSGALTSGVHTFPAVLQSSGLYSLSSVV
TVPSSSLGTQTYICNVNHKPSNTKVDKKVEPKSCDKTHTCPPCPAPELLGGPSVFLFPPKPKDT
LMISRTPEVTCVVVDVSHEDPEVKFNWYVDGVEVHNAKTKPREEQYNSTYRVVSVLTVLHQDWL
NGKEYKCKVSNKALPAPIEKTISKAKGQPREPQVYTLPPSRDELTKNQVSLTCLVKGFYPSDIA
VEWESNGQPENNYKTTPPVLDSDGSFFLYSKLTVDKSRWQQGNVFSCSVMHEALHNHYTQKSLS
LSPG
ABTx255 light chain (LC):
(SEQ ID NO: 1024)
AIQLTQSPSSLSASVGDRVTITCRASQGISSALAWYQQKPGKAPKLLIYDASSLESGVPSRFSG
SGSGTDFTLTISSLQPEDFATYYCQQVRSYPLTFGGGTKVEIKRTVAAPSVFIFPPSDEQLKSG
TASVVCLLNNFYPREAKVQWKVDNALQSGNSQESVTEQDSKDSTYSLSSTLTLSKADYEKHKVY
ACEVTHQGLSSPVTKSFNRGEC.

[0167] The three CDRs of the ABTx255 antibody VH region are as follows:

```
  (SEQ ID NO: 421)
VH CDR1: GYRFTSYW;
  (SEQ ID NO: 972)
VH CDR2: IYPGDSDTK; and
  (SEQ ID NO: 948)
VH CDR3: ARHGRGYDGYEGAFDI.
The three CDRs of the ABTx255 antibody VL
region are as follows:
  (SEQ ID NO: 424)
VL CDR1: QGISSA;
VL CDR2: DAS;
and
(SEQ ID NO: 1025)
VL CDR3: QQVRSYPLT.
```

[0168] The four framework (FR) regions, i.e., FR1, FR2, FR3, and FR4, of the ABTx255 antibody are located on either side of each of the CDRs in VH and VL region sequences shown supra. In particular, the four FRs of the ABTx255 antibody VH region are as follows:

```
  (SEQ ID NO: 426)
VH FR1: QVQLVQSGAAVKKPGESLKISCKGS;
  (SEQ ID NO: 427)
VH FR2: IGWVRQMPGKGLEWMGI;
and
  (SEQ ID NO: 428)
VH FR3: RYSPSFQGQVTISAGKSISTAYLQWSSLKASDTAMYYC
or
  (SEQ ID NO: 973)
YSPSFQGQVTISAGKSISTAYLQWSSLKASDTAMYYC;
(SEQ ID NO: 429)
VH FR4: WGQGTMVTVSS
```

[0169] The four FRs of the ABTx255 antibody VL region are as follows:

VL FR1:
(SEQ ID NO: 430)
AIQLTQSPSSLSASVGDRVTITCRAS;
VL FR2:
(SEQ ID NO: 431)
LAWYQQKPGKAPKLLIY;
VL FR3:
(SEQ ID NO: 432)
SLESGVPSRFSGSGSGTDFTLTISSLQPEDFATYYC;
and
VL FR4:
(SEQ ID NO: 433)
FGGGTKVEIKRTV.

[0170] By “ABTx255 polynucleotide” is meant a nucleic acid molecule (e.g., DNA) encoding at least a fragment of an ABTx255 antibody. In an embodiment, the encoded fragment has antigen binding activity.

[0171] By “ABTx256” is meant an antibody having at least about 85% amino acid sequence identity to an antibody sequence of antibody ABTx256 or comprising VH and/or VL CDRs 1-3 of ABTx256 or antigen binding fragments thereof, wherein each of the antibody, CDRs, and antigen binding fragments specifically bind to a wild type CD117 polypeptide but fail to detectably bind or have only reduced binding to an altered CD117 polypeptide. In embodiments, the antibody or antigen binding fragment thereof has at least 90%, 93%, 95%, 98%, 99% or 100% amino acid sequence identity to an antibody sequence of antibody ABTx256. Exemplary heavy chain and light chain sequences for antibody ABTx256 are provided below, where the variable regions are in plain text, the constant domains are in bold, and complementarity determining regions (CDRs), i.e., CDR1, CDR2, and CDR2, are underlined:

ABTx256 heavy chain (HC):
(SEQ ID NO: 1026)
QVQLVQSGAAVKKPGESLKISCKGSGYRFTSYWIGWVRQMPGKGLEWMG
IIYPGDSDTRYSPSFQGQVTISAGKSISTAYLQWSSLKASDTAMYYCAR
HGRGYDAYEGAFDIWGQGTMVTVSSASTKGPSVFPLAPSSKSTSGGTAA
LGCLVKDYFPEPVTVSWNSGALTSGVHTFPAVLQSSGLYSLSSVVTVPS
SSLGTQTYICNVNHKPSNTKVDKKVEPKSCDKTHTCPPCPAPELLGGPS
VFLFPPKPKDTLMISRTPEVTCVVVDVSHEDPEVKFNWYVDGVEVHNAK
TKPREEQYNSTYRVVSVLTVLHQDWLNGKEYKCKVSNKALPAPIEKTIS
KAKGQPREPQVYTLPPSRDELTKNQVSLTCLVKGFYPSDIAVEWESNGQ
PENNYKTTPPVLDSDGSFFLYSKLTVDKSRWQQGNVFSCSVMHEALHNH
YTQKSLSLSPG
ABTx256 light chain (LC):
(SEQ ID NO: 1028)
AIQLTQSPSSLSASVGDRVTITCRASQGISSALAWYQQKPGKAPKLLIY
DASSLESGVPSRFSGSGSGTDFTLTISSLQPEDFATYYCQQTYSYPLTF
GGGTKVEIKRTVAAPSVFIFPPSDEQLKSGTASVVCLLNNFYPREAKVQ
WKVDNALQSGNSQESVTEQDSKDSTYSLSSTLTLSKADYEKHKVYACEV
THQGLSSPVTKSFNRGEC.

[0172] The three CDRs of the ABTx256 antibody VH region are as follows:

VH CDR1:
(SEQ ID NO: 421)
GYRFTSYW;
VH CDR2:
(SEQ ID NO: 958)
IYPGDSDTR;
and
VH CDR3:
(SEQ ID NO: 1027)
ARHGRGYDAYEGAFDI.

[0173] The three CDRs of the ABTx256 antibody VL region are as follows:

VL CDR1:
(SEQ ID NO: 424)
QGISSA;
VL CDR2:
DAS;
and
VL CDR3:
(SEQ ID NO: 1029)
QQTYSYPLT.

[0174] The four framework (FR) regions, i.e., FR1, FR2, FR3, and FR4, of the ABTx256 antibody are located on either side of each of the CDRs in VH and VL region sequences shown supra. In particular, the four FRs of the ABTx256 antibody VH region are as follows:

VH FR1:
(SEQ ID NO: 426)
QVQLVQSGAAVKKPGESLKISCKGS;
VH FR2:
(SEQ ID NO: 427)
IGWVRQMPGKGLEWMGI;
and
VH FR3:
(SEQ ID NO: 428)
RYSPSFQGQVTISAGKSISTAYLQWSSLKASDTAMYYC
or
(SEQ ID NO: 973)
YSPSFQGQVTISAGKSISTAYLQWSSLKASDTAMYYC;
VH FR4:
(SEQ ID NO: 429)
WGQGTMVTVSS.

[0175] The four FRs of the ABTx256 antibody VL region are as follows:

VL FR1:
(SEQ ID NO: 430)
AIQLTQSPSSLSASVGDRVTITCRAS;
VL FR2:
(SEQ ID NO: 431)
LAWYQQKPGKAPKLLIY;
VL FR3:
(SEQ ID NO: 432)
SLESGVPSRFSGSGSGTDFTLTISSLQPEDFATYYC;
and
VL FR4:
(SEQ ID NO: 433)
FGGGTKVEIKRTV.

[0176] By “ABTx256 polynucleotide” is meant a nucleic acid molecule (e.g., DNA) encoding at least a fragment of an ABTx256 antibody. In an embodiment, the encoded fragment has antigen binding activity.

[0177] By “ABTx257” is meant an antibody having at least about 85% amino acid sequence identity to an antibody sequence of antibody ABTx257 or comprising VH and/or VL CDRs 1-3 of ABTx257 or antigen binding fragments thereof, wherein each of the antibody, CDRs, and antigen binding fragments specifically bind to a wild type CD117 polypeptide but fail to detectably bind or have only reduced binding to an altered CD117 polypeptide. In embodiments, the antibody or antigen binding fragment thereof has at least 90%, 93%, 95%, 98%, 99% or 100% amino acid sequence identity to an antibody sequence of antibody ABTx257. Exemplary heavy chain and light chain sequences for antibody ABTx257 are provided below, where the variable regions are in plain text, the constant domains are in bold, and complementarity determining regions (CDRs), i.e., CDR1, CDR2, and CDR2, are underlined:

ABTx257 heavy chain (HC):
(SEQ ID NO: 1030)
QVQLVQSGAAVKKPGESLKISCKGSGYRFTSYWIGWVRQMPGKGLEWMG
IIYPGDSDTKYSPSFQGQVTISAGKSISTAYLQWSSLKASDTAMYYCAR
HGRGYDAYDGAFDIWGQGTMVTVSSASTKGPSVFPLAPSSKSTSGGTAA
LGCLVKDYFPEPVTVSWNSGALTSGVHTFPAVLQSSGLYSLSSVVTVPS
SSLGTQTYICNVNHKPSNTKVDKKVEPKSCDKTHTCPPCPAPELLGGPS
VFLFPPKPKDTLMISRTPEVTCVVVDVSHEDPEVKFNWYVDGVEVHNAK
TKPREEQYNSTYRVVSVLTVLHQDWLNGKEYKCKVSNKALPAPIEKTIS
KAKGQPREPQVYTLPPSRDELTKNQVSLTCLVKGFYPSDIAVEWESNGQ
PENNYKTTPPVLDSDGSFFLYSKLTVDKSRWQQGNVFSCSVMHEALHNH
YTQKSLSLSPG
ABTx257 light chain (LC):
(SEQ ID NO: 1031)
AIQLTQSPSSLSASVGDRVTITCRASQGISSALAWYQQKPGKAPKLLIY
DASSLESGVPSRFSGSGSGTDFTLTISSLQPEDFATYYCQQTNSYPLTF
GGGTKVEIKRTVAAPSVFIFPPSDEQLKSGTASVVCLLNNFYPREAKVQ
WKVDNALQSGNSQESVTEQDSKDSTYSLSSTLTLSKADYEKHKVYACEV
THQGLSSPVTKSFNRGEC.

[0178] The three CDRs of the ABTx257 antibody VH region are as follows:

VH CDR1:
(SEQ ID NO: 421)
GYRFTSYW;
VH CDR2:
(SEQ ID NO: 972)
IYPGDSDTK;
and
VH CDR3:
(SEQ ID NO: 1032)
ARHGRGYDAYDGAFDI.
The three CDRs of the ABTx257 antibody VL region
are as follows:
VL CDR1:
(SEQ ID NO: 424)
QGISSA;
VL CDR2:
DAS;
and
VL CDR3:
(SEQ ID NO: 1044)
QQTNSYPLT.

[0179] The four framework (FR) regions, i.e., FR1, FR2, FR3, and FR4, of the ABTx257 antibody are located on either side of each of the CDRs in VH and VL region sequences shown supra. In particular, the four FRs of the ABTx257 antibody VH region are as follows:

VH FR1:
(SEQ ID NO: 426)
QVQLVQSGAAVKKPGESLKISCKGS;
VH FR2:
(SEQ ID NO: 427)
IGWVRQMPGKGLEWMGI;
and
VH FR3:
(SEQ ID NO: 428)
RYSPSFQGQVTISAGKSISTAYLQWSSLKASDTAMYYC
or
(SEQ ID NO: 973)
YSPSFQGQVTISAGKSISTAYLQWSSLKASDTAMYYC;
VH FR4:
(SEQ ID NO: 429)
WGQGTMVTVSS.

[0180] The four FRs of the ABTx257 antibody VL region are as follows:

VL FR1:
(SEQ ID NO: 430)
AIQLTQSPSSLSASVGDRVTITCRAS;
VL FR2:
(SEQ ID NO: 431)
LAWYQQKPGKAPKLLIY;
VL FR3:
(SEQ ID NO: 432)
SLESGVPSRFSGSGSGTDFTLTISSLQPEDFATYYC;
and
VL FR4:
(SEQ ID NO: 433)
FGGGTKVEIKRTV.

[0181] By “ABTx257 polynucleotide” is meant a nucleic acid molecule (e.g., DNA) encoding at least a fragment of an ABTx257 antibody. In an embodiment, the encoded fragment has antigen binding activity.

[0182] By “ABTx258” is meant an antibody having at least about 85% amino acid sequence identity to an antibody sequence of antibody ABTx258 or comprising VH and/or VL CDRs 1-3 of ABTx258 or antigen binding fragments thereof, wherein each of the antibody, CDRs, and antigen binding fragments specifically bind to a wild type CD117 polypeptide but fail to detectably bind or have only reduced binding to an altered CD117 polypeptide. In embodiments, the antibody or antigen binding fragment thereof has at least 90%, 93%, 95%, 98%, 99% or 100% amino acid sequence identity to an antibody sequence of antibody ABTx258. Exemplary heavy chain and light chain sequences for antibody ABTx258 are provided below, where the variable regions are in plain text, the constant domains are in bold, and complementarity determining regions (CDRs), i.e., CDR1, CDR2, and CDR2, are underlined:

ABTx258 heavy chain (HC):
(SEQ ID NO: 1034)
QVQLVQSGAAVKKPGESLKISCKGSGYRFTSYWIGWVRQMPGKGLEWMG
IIYPGDSDTKYSPSFQGQVTISAGKSISTAYLQWSSLKASDTAMYYCAR
HGRGYDAYEGAFDIWGQGTMVTVSSASTKGPSVFPLAPSSKSTSGGTAA
LGCLVKDYFPEPVTVSWNSGALTSGVHTFPAVLQSSGLYSLSSVVTVPS
SSLGTQTYICNVNHKPSNTKVDKKVEPKSCDKTHTCPPCPAPELLGGPS
VFLFPPKPKDTLMISRTPEVTCVVVDVSHEDPEVKFNWYVDGVEVHNAK
TKPREEQYNSTYRVVSVLTVLHQDWLNGKEYKCKVSNKALPAPIEKTIS
KAKGQPREPQVYTLPPSRDELTKNQVSLTCLVKGFYPSDIAVEWESNGQ
PENNYKTTPPVLDSDGSFFLYSKLTVDKSRWQQGNVFSCSVMHEALHNH
YTQKSLSLSPG
ABTx258 light chain (LC):
(SEQ ID NO: 1024)
AIQLTQSPSSLSASVGDRVTITCRASQGISSALAWYQQKPGKAPKLLIY
DASSLESGVPSRFSGSGSGTDFTLTISSLQPEDFATYYCQQVRSYPLTF
GGGTKVEIKRTVAAPSVFIFPPSDEQLKSGTASVVCLLNNFYPREAKVQ
WKVDNALQSGNSQESVTEQDSKDSTYSLSSTLTLSKADYEKHKVYACEV
THQGLSSPVTKSFNRGEC.

[0183] The three CDRs of the ABTx258 antibody VH region are as follows:

VH CDR1:
(SEQ ID NO: 421)
GYRFTSYW;
VH CDR2:
(SEQ ID NO: 972)
IYPGDSDTK;
and
VH CDR3:
(SEQ ID NO: 1027)
ARHGRGYDAYEGAFDI.
The three CDRs of the ABTx058 antibody VL region
are as follows:
VL CDR1:
(SEQ ID NO: 424)
QGISSA;
VL CDR2:
DAS;
and
VL CDR3:
(SEQ ID NO: 1025)
QQVRSYPLT.

[0184] The four framework (FR) regions, i.e., FR1, FR2, FR3, and FR4, of the ABTx258 antibody are located on either side of each of the CDRs in VH and VL region sequences shown supra. In particular, the four FRs of the ABTx258 antibody VH region are as follows:

VH FR1:
(SEQ ID NO: 426)
QVQLVQSGAAVKKPGESLKISCKGS;
VH FR2:
(SEQ ID NO: 427)
IGWVRQMPGKGLEWMGI;
and
VH FR3:
(SEQ ID NO: 428)
RYSPSFQGQVTISAGKSISTAYLQWSSLKASDTAMYYC
or
(SEQ ID NO: 973)
YSPSFQGQVTISAGKSISTAYLQWSSLKASDTAMYYC;
VH FR4:
(SEQ ID NO: 429)
WGQGTMVTVSS.

[0185] The four FRs of the ABTx258 antibody VL region are as follows:

VL FR1:
(SEQ ID NO: 430)
AIQLTQSPSSLSASVGDRVTITCRAS;
VL FR2:
(SEQ ID NO: 431)
LAWYQQKPGKAPKLLIY;
VL FR3:
(SEQ ID NO: 432)
SLESGVPSRFSGSGSGTDFTLTISSLQPEDFATYYC;
and
VL FR4:
(SEQ ID NO: 433)
FGGGTKVEIKRTV.

[0186] By “ABTx258 polynucleotide” is meant a nucleic acid molecule (e.g., DNA) encoding at least a fragment of an ABTx258 antibody. In an embodiment, the encoded fragment has antigen binding activity.

[0187] By “ABTx259” is meant an antibody having at least about 85% amino acid sequence identity to an antibody sequence of antibody ABTx259 or comprising VH and/or VL CDRs 1-3 of ABTx259 or antigen binding fragments thereof, wherein each of the antibody, CDRs, and antigen binding fragments specifically bind to a wild type CD117 polypeptide but fail to detectably bind or have only reduced binding to an altered CD117 polypeptide. In embodiments, the antibody or antigen binding fragment thereof has at least 90%, 93%, 95%, 98%, 99% or 100% amino acid sequence identity to an antibody sequence of antibody ABTx259. Exemplary heavy chain and light chain sequences for antibody ABTx259 are provided below, where the variable regions are in plain text, the constant domains are in bold, and complementarity determining regions (CDRs), i.e., CDR1, CDR2, and CDR2, are underlined:

ABTx259 heavy chain (HC):
(SEQ ID NO: 1016)
QVQLVQSGAAVKKPGESLKISCKGSGYRFTSYWIGWVRQMPGKGLEWMG
IIYPGDSDTKYSPSFQGQVTISAGKSISTAYLQWSSLKASDTAMYYCAR
HGRGYDGYEGAFDIWGQGTMVTVSSASTKGPSVFPLAPSSKSTSGGTAA
LGCLVKDYFPEPVTVSWNSGALTSGVHTFPAVLQSSGLYSLSSVVTVPS
SSLGTQTYICNVNHKPSNTKVDKKVEPKSCDKTHTCPPCPAPELLGGPS
VFLFPPKPKDTLMISRTPEVTCVVVDVSHEDPEVKFNWYVDGVEVHNAK
TKPREEQYNSTYRVVSVLTVLHQDWLNGKEYKCKVSNKALPAPIEKTIS
KAKGQPREPQVYTLPPSRDELTKNQVSLTCLVKGFYPSDIAVEWESNGQ
PENNYKTTPPVLDSDGSFFLYSKLTVDKSRWQQGNVFSCSVMHEALHNH
YTQKSLSLSPG
ABTx259 light chain (LC):
(SEQ ID NO: 1035)
AIQLTQSPSSLSASVGDRVTITCRASQGISSALAWYQQKPGKAPKLLIY
DASSLESGVPSRFSGSGSGTDFTLTISSLQPEDFATYYCQQTRSYPLTF
GGGTKVEIKRTVAAPSVFIFPPSDEQLKSGTASVVCLLNNFYPREAKVQ
WKVDNALQSGNSQESVTEQDSKDSTYSLSSTLTLSKADYEKHKVYACEV
THQGLSSPVTKSFNRGEC.

[0188] The three CDRs of the ABTx259 antibody VH region are as follows:

VH CDR1:
(SEQ ID NO: 421)
GYRFTSYW;
VH CDR2:
(SEQ ID NO: 972)
IYPGDSDTK;
and
VH CDR3:
(SEQ ID NO: 948)
ARHGRGYDGYEGAFDI.
The three CDRs of the ABTx259 antibody VL region
are as follows:
VL CDR1:
(SEQ ID NO: 424)
QGISSA;
VL CDR2:
DAS;
and
VL CDR3:
(SEQ ID NO: 1036)
QQTRSYPLT.

[0189] The four framework (FR) regions, i.e., FR1, FR2, FR3, and FR4, of the ABTx259 antibody are located on either side of each of the CDRs in VH and VL region sequences shown supra. In particular, the four FRs of the ABTx259 antibody VH region are as follows:

VH FR1:
(SEQ ID NO: 426)
QVQLVQSGAAVKKPGESLKISCKGS;
VH FR2:
(SEQ ID NO: 427)
IGWVRQMPGKGLEWMGI;
and
VH FR3:
(SEQ ID NO: 428)
RYSPSFQGQVTISAGKSISTAYLQWSSLKASDTAMYYC
or
(SEQ ID NO: 973)
YSPSFQGQVTISAGKSISTAYLQWSSLKASDTAMYYC;
VH FR4:
(SEQ ID NO: 429)
WGQGTMVTVSS.

[0190] The four FRs of the ABTx259 antibody VL region are as follows:

VL FR1:
(SEQ ID NO: 430)
AIQLTQSPSSLSASVGDRVTITCRAS;
VL FR2:
(SEQ ID NO: 431)
LAWYQQKPGKAPKLLIY;
VL FR3:
(SEQ ID NO: 432)
SLESGVPSRFSGSGSGTDFTLTISSLQPEDFATYYC;
and
VL FR4:
(SEQ ID NO: 433)
FGGGTKVEIKRTV.

[0191] By “ABTx259 polynucleotide” is meant a nucleic acid molecule (e.g., DNA) encoding at least a fragment of an ABTx259 antibody. In an embodiment, the encoded fragment has antigen binding activity.

[0192] By “ABTx260” is meant an antibody having at least about 85% amino acid sequence identity to an antibody sequence of antibody ABTx260 or comprising VH and/or VL CDRs 1-3 of ABTx260 or antigen binding fragments thereof, wherein each of the antibody, CDRs, and antigen binding fragments specifically bind to a wild type CD117 polypeptide but fail to detectably bind or have only reduced binding to an altered CD117 polypeptide. In embodiments, the antibody or antigen binding fragment thereof has at least 90%, 93%, 95%, 98%, 99% or 100% amino acid sequence identity to an antibody sequence of antibody ABTx260. Exemplary heavy chain and light chain sequences for antibody ABTx260 are provided below, where the variable regions are in plain text, the constant domains are in bold, and complementarity determining regions (CDRs), i.e., CDR1, CDR2, and CDR2, are underlined:

ABTx260 heavy chain (HC):
(SEQ ID NO: 1021)
QVQLVQSGAAVKKPGESLKISCKGSGYRFTSYWIGWVRQMPGKGLEWMG
IIYPGDSDTKYSPSFQGQVTISAGKSISTAYLQWSSLKASDTAMYYCAR
HGRGYDGYDGAFDIWGQGTMVTVSSASTKGPSVFPLAPSSKSTSGGTAA
LGCLVKDYFPEPVTVSWNSGALTSGVHTFPAVLQSSGLYSLSSVVTVPS
SSLGTQTYICNVNHKPSNTKVDKKVEPKSCDKTHTCPPCPAPELLGGPS
VFLFPPKPKDTLMISRTPEVTCVVVDVSHEDPEVKFNWYVDGVEVHNAK
TKPREEQYNSTYRVVSVLTVLHQDWLNGKEYKCKVSNKALPAPIEKTIS
KAKGQPREPQVYTLPPSRDELTKNQVSLTCLVKGFYPSDIAVEWESNGQ
PENNYKTTPPVLDSDGSFFLYSKLTVDKSRWQQGNVFSCSVMHEALHNH
YTQKSLSLSPG
ABTx260 light chain (LC):
(SEQ ID NO: 1037)
AIQLTQSPSSLSASVGDRVTITCRASQGISSALAWYQQKPGKAPKLLIY
DASSLESGVPSRFSGSGSGTDFTLTISSLQPEDFATYYCQQVNSHPLTF
GGGTKVEIKRTVAAPSVFIFPPSDEQLKSGTASVVCLLNNFYPREAKVQ
WKVDNALQSGNSQESVTEQDSKDSTYSLSSTLTLSKADYEKHKVYACEV
THQGLSSPVTKSFNRGEC.

[0193] The three CDRs of the ABTx260 antibody VH region are as follows:

VH CDR1:
(SEQ ID NO: 421)
GYRFTSYW;
VH CDR2:
(SEQ ID NO: 972)
IYPGDSDTK;
and
VH CDR3:
(SEQ ID NO: 1012)
ARHGRGYDGYDGAFDI.

[0194] The three CDRs of the ABTx260 antibody VL region are as follows:

VL CDR1:
(SEQ ID NO: 424)
QGISSA;
VL CDR2:
DAS;
and
VL CDR3:
(SEQ ID NO: 1038)
QQVNSHPLT.

[0195] The four framework (FR) regions, i.e., FR1, FR2, FR3, and FR4, of the ABTx260 antibody are located on either side of each of the CDRs in VH and VL region sequences shown supra. In particular, the four FRs of the ABTx260 antibody VH region are as follows:

VH FR1:
(SEQ ID NO: 426)
QVQLVQSGAAVKKPGESLKISCKGS;
VH FR2:
(SEQ ID NO: 427)
IGWVRQMPGKGLEWMGI;
and
VH FR3:
(SEQ ID NO: 428)
RYSPSFQGQVTISAGKSISTAYLQWSSLKASDTAMYYC
or
(SEQ ID NO: 973)
YSPSFQGQVTISAGKSISTAYLQWSSLKASDTAMYYC;
VH FR4:
(SEQ ID NO: 429)
WGQGTMVTVSS.

[0196] The four FRs of the ABTx260 antibody VL region are as follows:

VL FR1:
(SEQ ID NO: 430)
AIQLTQSPSSLSASVGDRVTITCRAS;
VL FR2:
(SEQ ID NO: 431)
LAWYQQKPGKAPKLLIY;
VL FR3:
(SEQ ID NO: 432)
SLESGVPSRFSGSGSGTDFTLTISSLQPEDFATYYC;
and
VL FR4:
(SEQ ID NO: 433)
FGGGTKVEIKRTV.

[0197] By “ABTx260 polynucleotide” is meant a nucleic acid molecule (e.g., DNA) encoding at least a fragment of an ABTx260 antibody. In an embodiment, the encoded fragment has antigen binding activity.

[0198] By “ABTx261” is meant an antibody having at least about 85% amino acid sequence identity to an antibody sequence of antibody ABTx261 or comprising VH and/or VL CDRs 1-3 of ABTx261 or antigen binding fragments thereof, wherein each of the antibody, CDRs, and antigen binding fragments specifically bind to a wild type CD117 polypeptide but fail to detectably bind or have only reduced binding to an altered CD117 polypeptide. In embodiments, the antibody or antigen binding fragment thereof has at least 90%, 93%, 95%, 98%, 99% or 100% amino acid sequence identity to an antibody sequence of antibody ABTx261. Exemplary heavy chain and light chain sequences for antibody ABTx261 are provided below, where the variable regions are in plain text, the constant domains are in bold, and complementarity determining regions (CDRs), i.e., CDR1, CDR2, and CDR2, are underlined:

ABTx261 heavy chain (HC):
(SEQ ID NO: 1034)
QVQLVQSGAAVKKPGESLKISCKGSGYRFTSYWIGWVRQMPGKGLEWMG
IIYPGDSDTKYSPSFQGQVTISAGKSISTAYLQWSSLKASDTAMYYCAR
HGRGYDAYEGAFDIWGQGTMVTVSSASTKGPSVFPLAPSSKSTSGGTAA
LGCLVKDYFPEPVTVSWNSGALTSGVHTFPAVLQSSGLYSLSSVVTVPS
SSLGTQTYICNVNHKPSNTKVDKKVEPKSCDKTHTCPPCPAPELLGGPS
VFLFPPKPKDTLMISRTPEVTCVVVDVSHEDPEVKFNWYVDGVEVHNAK
TKPREEQYNSTYRVVSVLTVLHQDWLNGKEYKCKVSNKALPAPIEKTIS
KAKGQPREPQVYTLPPSRDELTKNQVSLTCLVKGFYPSDIAVEWESNGQ
PENNYKTTPPVLDSDGSFFLYSKLTVDKSRWQQGNVFSCSVMHEALHNH
YTQKSLSLSPG
ABTx261 light chain (LC):
(SEQ ID NO: 1035)
AIQLTQSPSSLSASVGDRVTITCRASQGISSALAWYQQKPGKAPKLLIY
DASSLESGVPSRFSGSGSGTDFTLTISSLQPEDFATYYCQQTRSYPLTF
GGGTKVEIKRTVAAPSVFIFPPSDEQLKSGTASVVCLLNNFYPREAKVQ
WKVDNALQSGNSQESVTEQDSKDSTYSLSSTLTLSKADYEKHKVYACEV
THQGLSSPVTKSFNRGEC.

[0199] The three CDRs of the ABTx261 antibody VH region are as follows:

VH CDR1:
(SEQ ID NO: 421)
GYRFTSYW;
VH CDR2:
(SEQ ID NO: 972)
IYPGDSDTK;
and
VH CDR3:
(SEQ ID NO: 1027)
ARHGRGYDAYEGAFDI.

[0200] The three CDRs of the ABTx261 antibody VL region are as follows:

VL CDR1:
(SEQ ID NO: 424)
QGISSA;
VL CDR2:
DAS;
and
VL CDR3:
(SEQ ID NO: 1036)
QQTRSYPLT.

[0201] The four framework (FR) regions, i.e., FR1, FR2, FR3, and FR4, of the ABTx261 antibody are located on either side of each of the CDRs in VH and VL region sequences shown supra. In particular, the four FRs of the ABTx261 antibody VH region are as follows:

VH FR1:
(SEQ ID NO: 426)
QVQLVQSGAAVKKPGESLKISCKGS;
VH FR2:
(SEQ ID NO: 427)
IGWVRQMPGKGLEWMGI;
and
VH FR3:
(SEQ ID NO: 428)
RYSPSFQGQVTISAGKSISTAYLQWSSLKASDTAMYYC
or
(SEQ ID NO: 973)
YSPSFQGQVTISAGKSISTAYLQWSSLKASDTAMYYC;
VH FR4:
(SEQ ID NO: 429)
WGQGTMVTVSS.

[0202] The four FRs of the ABTx261 antibody VL region are as follows:

VL FR1:
(SEQ ID NO: 430)
AIQLTQSPSSLSASVGDRVTITCRAS;
VL FR2:
(SEQ ID NO: 431)
LAWYQQKPGKAPKLLIY;
VL FR3:
(SEQ ID NO: 432)
SLESGVPSRFSGSGSGTDFTLTISSLQPEDFATYYC;
and
VL FR4:
(SEQ ID NO: 433)
FGGGTKVEIKRTV.

[0203] By “ABTx261 polynucleotide” is meant a nucleic acid molecule (e.g., DNA) encoding at least a fragment of an ABTx261 antibody. In an embodiment, the encoded fragment has antigen binding activity.

[0204] By “ABTx262” is meant an antibody having at least about 85% amino acid sequence identity to an antibody sequence of antibody ABTx262 or comprising VH and/or VL CDRs 1-3 of ABTx262 or antigen binding fragments thereof, wherein each of the antibody, CDRs, and antigen binding fragments specifically bind to a wild type CD117 polypeptide but fail to detectably bind or have only reduced binding to an altered CD117 polypeptide. In embodiments, the antibody or antigen binding fragment thereof has at least 90%, 93%, 95%, 98%, 99% or 100% amino acid sequence identity to an antibody sequence of antibody ABTx262. Exemplary heavy chain and light chain sequences for antibody ABTx262 are provided below, where the variable regions are in plain text, the constant domains are in bold, and complementarity determining regions (CDRs), i.e., CDR1, CDR2, and CDR2, are underlined:

ABTx262 heavy chain (HC):
(SEQ ID NO: 1026)
QVQLVQSGAAVKKPGESLKISCKGSGYRFTSYWIGWVRQMPGKGLEWMG
IIYPGDSDTRYSPSFQGQVTISAGKSISTAYLQWSSLKASDTAMYYCAR
HGRGYDAYEGAFDIWGQGTMVTVSSASTKGPSVFPLAPSSKSTSGGTAA
LGCLVKDYFPEPVTVSWNSGALTSGVHTFPAVLQSSGLYSLSSVVTVPS
SSLGTQTYICNVNHKPSNTKVDKKVEPKSCDKTHTCPPCPAPELLGGPS
VFLFPPKPKDTLMISRTPEVTCVVVDVSHEDPEVKFNWYVDGVEVHNAK
TKPREEQYNSTYRVVSVLTVLHQDWLNGKEYKCKVSNKALPAPIEKTIS
KAKGQPREPQVYTLPPSRDELTKNQVSLTCLVKGFYPSDIAVEWESNGQ
PENNYKTTPPVLDSDGSFFLYSKLTVDKSRWQQGNVFSCSVMHEALHNH
YTQKSLSLSPG
ABTx262 light chain (LC):
(SEQ ID NO: 1039)
AIQLTQSPSSLSASVGDRVTITCRASQGISSALAWYQQKPGKAPKLLIY
DASSLESGVPSRFSGSGSGTDFTLTISSLQPEDFATYYCQQFRSSPLTF
GGGTKVEIKRTVAAPSVFIFPPSDEQLKSGTASVVCLLNNFYPREAKVQ
WKVDNALQSGNSQESVTEQDSKDSTYSLSSTLTLSKADYEKHKVYACEV
THQGLSSPVTKSFNRGEC.

[0205] The three CDRs of the ABTx262 antibody VH region are as follows:

VH CDR1:
(SEQ ID NO: 421)
GYRFTSYW;
VH CDR2:
(SEQ ID NO: 958)
IYPGDSDTR;
and
VH CDR3:
(SEQ ID NO: 1027)
ARHGRGYDAYEGAFDI.

[0206] The three CDRs of the ABTx262 antibody VL region are as follows:

(SEQ ID NO: 424)
VL CDR1: QGISSA;
VL CDR2: DAS;
and
(SEQ ID NO: 1040)
VL CDR3: QQFRSSPLT.

[0207] The four framework (FR) regions, i.e., FR1, FR2, FR3, and FR4, of the ABTx262 antibody are located on either side of each of the CDRs in VH and VL region sequences shown supra. In particular, the four FRs of the ABTx262 antibody VH region are as follows:

(SEQ ID NO: 426)
VH FR1: QVQLVQSGAAVKKPGESLKISCKGS;
(SEQ ID NO: 427)
VH FR2: IGWVRQMPGKGLEWMGI;
and
(SEQ ID NO: 428)
VH FR3: RYSPSFQGQVTISAGKSISTAYLQWSSLKASDTAMYYC
or
(SEQ ID NO: 973)
YSPSFQGQVTISAGKSISTAYLQWSSLKASDTAMYYC;
(SEQ ID NO: 429)
VH FR4: WGQGTMVTVSS.

[0208] The four FRs of the ABTx262 antibody VL region are as follows:

(SEQ ID NO: 430)
VL FR1: AIQLTQSPSSLSASVGDRVTITCRAS;
(SEQ ID NO: 431)
VL FR2: LAWYQQKPGKAPKLLIY;
(SEQ ID NO: 432)
VL FR3: SLESGVPSRFSGSGSGTDFTLTISSLQPEDFATYYC;
and
(SEQ ID NO: 433)
VL FR4: FGGGTKVEIKRTV.

[0209] By “ABTx262 polynucleotide” is meant a nucleic acid molecule (e.g., DNA) encoding at least a fragment of an ABTx262 antibody. In an embodiment, the encoded fragment has antigen binding activity.

[0210] By “ABTx263” is meant an antibody having at least about 85% amino acid sequence identity to an antibody sequence of antibody ABTx263 or comprising VH and/or VL CDRs 1-3 of ABTx263 or antigen binding fragments thereof, wherein each of the antibody, CDRs, and antigen binding fragments specifically bind to a wild type CD117 polypeptide but fail to detectably bind or have only reduced binding to an altered CD117 polypeptide. In embodiments, the antibody or antigen binding fragment thereof has at least 90%, 93%, 95%, 98%, 99% or 100% amino acid sequence identity to an antibody sequence of antibody ABTx263. Exemplary heavy chain and light chain sequences for antibody ABTx263 are provided below, where the variable regions are in plain text, the constant domains are in bold, and complementarity determining regions (CDRs), i.e., CDR1, CDR2, and CDR2, are underlined:

ABTx263 heavy chain (HC):
(SEQ ID NO: 1021)
QVQLVQSGAAVKKPGESLKISCKGSGYRFTSYWIGWVRQMPGKGLEWMGI
IYPGDSDTKYSPSFQGQVTISAGKSISTAYLQWSSLKASDTAMYYCARHG
RGYDGYDGAFDIWGQGTMVTVSSASTKGPSVFPLAPSSKSTSGGTAALGC
LVKDYFPEPVTVSWNSGALTSGVHTFPAVLQSSGLYSLSSVVTVPSSSLG
TQTYICNVNHKPSNTKVDKKVEPKSCDKTHTCPPCPAPELLGGPSVFLFP
PKPKDTLMISRTPEVTCVVVDVSHEDPEVKFNWYVDGVEVHNAKTKPREE
QYNSTYRVVSVLTVLHQDWLNGKEYKCKVSNKALPAPIEKTISKAKGQPR
EPQVYTLPPSRDELTKNQVSLTCLVKGFYPSDIAVEWESNGQPENNYKTT
PPVLDSDGSFFLYSKLTVDKSRWQQGNVFSCSVMHEALHNHYTQKSLSLS
PG
ABTx263 light chain (LC):
(SEQ ID NO: 1041)
AIQLTQSPSSLSASVGDRVTITCRASQGISSALAWYQQKPGKAPKLLIYD
ASSLESGVPSRFSGSGSGTDFTLTISSLQPEDFATYYCQQVYSYPLTFGG
GTKVEIKRTVAAPSVFIFPPSDEQLKSGTASVVCLLNNFYPREAKVQWKV
DNALQSGNSQESVTEQDSKDSTYSLSSTLTLSKADYEKHKVYACEVTHQG
LSSPVTKSFNRGEC.

[0211] The three CDRs of the ABTx263 antibody VH region are as follows:

(SEQ ID NO: 421)
VH CDR1: GYRFTSYW;
(SEQ ID NO: 972)
VH CDR2: IYPGDSDTK;
and
(SEQ ID NO: 1012)
VH CDR3: ARHGRGYDGYDGAFDI.

[0212] The three CDRs of the ABTx263 antibody VL region are as follows:

(SEQ ID NO: 424)
VL CDR1: QGISSA;
VL CDR2: DAS;
and
(SEQ ID NO: 1042)
VL CDR3: QQVYSYPLT.

[0213] The four framework (FR) regions, i.e., FR1, FR2, FR3, and FR4, of the ABTx263 antibody are located on either side of each of the CDRs in VH and VL region sequences shown supra. In particular, the four FRs of the ABTx263 antibody VH region are as follows:

(SEQ ID NO: 426)
VH FR1: QVQLVQSGAAVKKPGESLKISCKGS;
(SEQ ID NO: 427)
VH FR2: IGWVRQMPGKGLEWMGI;
and
(SEQ ID NO: 428)
VH FR3: RYSPSFQGQVTISAGKSISTAYLQWSSLKASDTAMYYC
or
(SEQ ID NO: 973)
YSPSFQGQVTISAGKSISTAYLQWSSLKASDTAMYYC;
(SEQ ID NO: 429)
VH FR4: WGQGTMVTVSS.

[0214] The four FRs of the ABTx263 antibody VL region are as follows:

(SEQ ID NO: 430)
VL FR1: AIQLTQSPSSLSASVGDRVTITCRAS;
(SEQ ID NO: 431)
VL FR2: LAWYQQKPGKAPKLLIY;
(SEQ ID NO: 432)
VL FR3: SLESGVPSRFSGSGSGTDFTLTISSLQPEDFATYYC;
and
(SEQ ID NO: 433)
VL FR4: FGGGTKVEIKRTV.

[0215] By “ABTx263 polynucleotide” is meant a nucleic acid molecule (e.g., DNA) encoding at least a fragment of an ABTx263 antibody. In an embodiment, the encoded fragment has antigen binding activity.

[0216] By “ABTx264” is meant an antibody having at least about 85% amino acid sequence identity to an antibody sequence of antibody ABTx264 or comprising VH and/or VL CDRs 1-3 of ABTx264 or antigen binding fragments thereof, wherein each of the antibody, CDRs, and antigen binding fragments specifically bind to a wild type CD117 polypeptide but fail to detectably bind or have only reduced binding to an altered CD117 polypeptide. In embodiments, the antibody or antigen binding fragment thereof has at least 90%, 93%, 95%, 98%, 99% or 100% amino acid sequence identity to an antibody sequence of antibody ABTx264. Exemplary heavy chain and light chain sequences for antibody ABTx264 are provided below, where the variable regions are in plain text, the constant domains are in bold, and complementarity determining regions (CDRs), i.e., CDR1, CDR2, and CDR2, are underlined:

ABTx264 heavy chain (HC):
(SEQ ID NO: 1034)
QVQLVQSGAAVKKPGESLKISCKGSGYRFTSYWIGWVRQMPGKGLEWMGI
IYPGDSDTKYSPSFQGQVTISAGKSISTAYLQWSSLKASDTAMYYCARHG
RGYDAYEGAFDIWGQGTMVTVSSASTKGPSVFPLAPSSKSTSGGTAALGC
LVKDYFPEPVTVSWNSGALTSGVHTFPAVLQSSGLYSLSSVVTVPSSSLG
TQTYICNVNHKPSNTKVDKKVEPKSCDKTHTCPPCPAPELLGGPSVFLFP
PKPKDTLMISRTPEVTCVVVDVSHEDPEVKFNWYVDGVEVHNAKTKPREE
QYNSTYRVVSVLTVLHQDWLNGKEYKCKVSNKALPAPIEKTISKAKGQPR
EPQVYTLPPSRDELTKNQVSLTCLVKGFYPSDIAVEWESNGQPENNYKTT
PPVLDSDGSFFLYSKLTVDKSRWQQGNVFSCSVMHEALHNHYTQKSLSLS
PG
ABTx264 light chain (LC):
(SEQ ID NO: 1028)
AIQLTQSPSSLSASVGDRVTITCRASQGISSALAWYQQKPGKAPKLLIYD
ASSLESGVPSRFSGSGSGTDFTLTISSLQPEDFATYYCQQTYSYPLTFGG
GTKVEIKRTVAAPSVFIFPPSDEQLKSGTASVVCLLNNFYPREAKVQWKV
DNALQSGNSQESVTEQDSKDSTYSLSSTLTLSKADYEKHKVYACEVTHQG
LSSPVTKSENRGEC.

[0217] The three CDRs of the ABTx264 antibody VH region are as follows:

VH CDR1:
(SEQ ID NO: 421)
GYRFTSYW;
VH CDR2:
(SEQ ID NO: 972)
IYPGDSDTK;
and
VH CDR3:
(SEQ ID NO: 1027)
ARHGRGYDAYEGAFDI.

[0218] The three CDRs of the ABTx264 antibody VL region are as follows:

(SEQ ID NO: 424)
VL CDR1: QGISSA;
VL CDR2: DAS;
and
(SEQ ID NO: 1029)
VL CDR3: QQTYSYPLT.

[0219] The four framework (FR) regions, i.e., FR1, FR2, FR3, and FR4, of the ABTx264 antibody are located on either side of each of the CDRs in VH and VL region sequences shown supra. In particular, the four FRs of the ABTx264 antibody VH region are as follows:

(SEQ ID NO: 426)
VH FR1: QVQLVQSGAAVKKPGESLKISCKGS;
(SEQ ID NO: 427)
VH FR2: IGWVRQMPGKGLEWMGI;
and
(SEQ ID NO: 428)
VH FR3: RYSPSFQGQVTISAGKSISTAYLQWSSLKASDTAMYYC
or
(SEQ ID NO: 973)
YSPSFQGQVTISAGKSISTAYLQWSSLKASDTAMYYC;
(SEQ ID NO: 429)
VH FR4: WGQGTMVTVSS.

[0220] The four FRs of the ABTx264 antibody VL region are as follows:

(SEQ ID NO: 430)
VL FR1: AIQLTQSPSSLSASVGDRVTITCRAS;
(SEQ ID NO: 431)
VL FR2: LAWYQQKPGKAPKLLIY;
(SEQ ID NO: 432)
VL FR3: SLESGVPSRFSGSGSGTDFTLTISSLQPEDFATYYC;
and
(SEQ ID NO: 433)
VL FR4: FGGGTKVEIKRTV.

[0221] By “ABTx264 polynucleotide” is meant a nucleic acid molecule (e.g., DNA) encoding at least a fragment of an ABTx264 antibody. In an embodiment, the encoded fragment has antigen binding activity.

[0222] By “ABTx265” is meant an antibody having at least about 85% amino acid sequence identity to an antibody sequence of antibody ABTx265 or comprising VH and/or VL CDRs 1-3 of ABTx265 or antigen binding fragments thereof, wherein each of the antibody, CDRs, and antigen binding fragments specifically bind to a wild type CD117 polypeptide but fail to detectably bind or have only reduced binding to an altered CD117 polypeptide. In embodiments, the antibody or antigen binding fragment thereof has at least 90%, 93%, 95%, 98%, 99% or 100% amino acid sequence identity to an antibody sequence of antibody ABTx265. Exemplary heavy chain and light chain sequences for antibody ABTx265 are provided below, where the variable regions are in plain text, the constant domains are in bold, and complementarity determining regions (CDRs), i.e., CDR1, CDR2, and CDR2, are underlined:

ABTx265 heavy chain (HC):
(SEQ ID NO: 1021)
QVQLVQSGAAVKKPGESLKISCKGSGYRFTSYWIGWVRQMPGKGLEWMGI
IYPGDSDTKYSPSFQGQVTISAGKSISTAYLQWSSLKASDTAMYYCARHG
RGYDGYDGAFDIWGQGTMVTVSSASTKGPSVFPLAPSSKSTSGGTAALGC
LVKDYFPEPVTVSWNSGALTSGVHTFPAVLQSSGLYSLSSVVTVPSSSLG
TQTYICNVNHKPSNTKVDKKVEPKSCDKTHTCPPCPAPELLGGPSVFLFP
PKPKDTLMISRTPEVTCVVVDVSHEDPEVKFNWYVDGVEVHNAKTKPREE
QYNSTYRVVSVLTVLHQDWLNGKEYKCKVSNKALPAPIEKTISKAKGQPR
EPQVYTLPPSRDELTKNQVSLTCLVKGFYPSDIAVEWESNGQPENNYKTT
PPVLDSDGSFFLYSKLTVDKSRWQQGNVFSCSVMHEALHNHYTQKSLSLS
PG
ABTx265 light chain (LC):
(SEQ ID NO: 1035)
AIQLTQSPSSLSASVGDRVTITCRASQGISSALAWYQQKPGKAPKLLIYD
ASSLESGVPSRFSGSGSGTDFTLTISSLQPEDFATYYCQQTRSYPLTFGG
GTKVEIKRTVAAPSVFIFPPSDEQLKSGTASVVCLLNNFYPREAKVQWKV
DNALQSGNSQESVTEQDSKDSTYSLSSTLTLSKADYEKHKVYACEVTHQG
LSSPVTKSFNRGEC.

[0223] The three CDRs of the ABTx265 antibody VH region are as follows:

(SEQ ID NO: 421)
VH CDR1: GYRFTSYW;
(SEQ ID NO: 972)
VH CDR2: IYPGDSDTK;
and
(SEQ ID NO: 1012)
VH CDR3: ARHGRGYDGYDGAFDI.

[0224] The three CDRs of the ABTx265 antibody VL region are as follows:

(SEQ ID NO: 424)
VL CDR1: QGISSA;
VL CDR2: DAS;
and
(SEQ ID NO: 1036)
VL CDR3: QQTRSYPLT.

[0225] The four framework (FR) regions, i.e., FR1, FR2, FR3, and FR4, of the ABTx265 antibody are located on either side of each of the CDRs in VH and VL region sequences shown supra. In particular, the four FRs of the ABTx265 antibody VH region are as follows:

VH FR1:
(SEQ ID NO: 426)
QVQLVQSGAAVKKPGESLKISCKGS;
VH FR2:
(SEQ ID NO: 427)
IGWVRQMPGKGLEWMGI;
and
VH FR3:
(SEQ ID NO: 428)
RYSPSFQGQVTISAGKSISTAYLQWSSLKASDTAMYYC
or
(SEQ ID NO: 973)
YSPSFQGQVTISAGKSISTAYLQWSSLKASDTAMYYC;
VH FR4:
(SEQ ID NO: 429)
WGQGTMVTVSS.

[0226] The four FRs of the ABTx265 antibody VL region are as follows:

VL FR1:
(SEQ ID NO: 430)
AIQLTQSPSSLSASVGDRVTITCRAS;
VL FR2:
(SEQ ID NO: 431)
LAWYQQKPGKAPKLLIY;
VL FR3:
(SEQ ID NO: 432)
SLESGVPSRFSGSGSGTDFTLTISSLQPEDFATYYC;
and
VL FR4:
(SEQ ID NO: 433)
FGGGTKVEIKRTV.

[0227] By “ABTx265 polynucleotide” is meant a nucleic acid molecule (e.g., DNA) encoding at least a fragment of an ABTx265 antibody. In an embodiment, the encoded fragment has antigen binding activity.

[0228] By “ABTx266” is meant an antibody having at least about 85% amino acid sequence identity to an antibody sequence of antibody ABTx266 or comprising VH and/or VL CDRs 1-3 of ABTx266 or antigen binding fragments thereof, wherein each of the antibody, CDRs, and antigen binding fragments specifically bind to a wild type CD117 polypeptide but fail to detectably bind or have only reduced binding to an altered CD117 polypeptide. In embodiments, the antibody or antigen binding fragment thereof has at least 90%, 93%, 95%, 98%, 99% or 100% amino acid sequence identity to an antibody sequence of antibody ABTx266. Exemplary heavy chain and light chain sequences for antibody ABTx266 are provided below, where the variable regions are in plain text, the constant domains are in bold, and complementarity determining regions (CDRs), i.e., CDR1, CDR2, and CDR2, are underlined:

ABTx266 heavy chain (HC):
(SEQ ID NO: 1026)
QVQLVQSGAAVKKPGESLKISCKGSGYRFTSYWIGWVRQMPGKGL
EWMGIIYPGDSDTRYSPSFQGQVTISAGKSISTAYLQWSSLKASD
TAMYYCARHGRGYDAYEGAFDIWGQGTMVTVSSASTKGPSVFPLA
PSSKSTSGGTAALGCLVKDYFPEPVTVSWNSGALTSGVHTFPAVL
QSSGLYSLSSVVTVPSSSLGTQTYICNVNHKPSNTKVDKKVEPKS
CDKTHTCPPCPAPELLGGPSVFLFPPKPKDTLMISRTPEVTCVVV
DVSHEDPEVKFNWYVDGVEVHNAKTKPREEQYNSTYRVVSVLTVL
HQDWLNGKEYKCKVSNKALPAPIEKTISKAKGQPREPQVYTLPPS
RDELTKNQVSLTCLVKGFYPSDIAVEWESNGQPENNYKTTPPVLD
SDGSFFLYSKLTVDKSRWQQGNVFSCSVMHEALHNHYTQKSLSLS
PG
ABTx266 light chain (LC):
(SEQ ID NO: 1046)
AIQLTQSPSSLSASVGDRVTITCRASQGISSALAWYQQKPGKAPK
LLIYDASSLESGVPSRFSGSGSGTDFTLTISSLQPEDFATYYCQQ
VRSHPLTFGGGTKVEIKRTVAAPSVFIFPPSDEQLKSGTASVVCL
LNNFYPREAKVQWKVDNALQSGNSQESVTEQDSKDSTYSLSSTLT
LSKADYEKHKVYACEVTHQGLSSPVTKSENRGEC.

[0229] The three CDRs of the ABTx266 antibody VH region are as follows:

VH CDR1:
(SEQ ID NO: 421)
GYRFTSYW;
VH CDR2:
(SEQ ID NO: 958)
IYPGDSDTR;
and
VH CDR3:
(SEQ ID NO: 1027)
ARHGRGYDAYEGAFDI.
The three CDRs of the ABTx266
antibody VL region are as follows:
VL CDR1:
(SEQ ID NO: 424)
QGISSA;
VL CDR2:
DAS;
and
VL CDR3:
(SEQ ID NO: 1047)
QQVRSHPLT.

[0230] The four framework (FR) regions, i.e., FR1, FR2, FR3, and FR4, of the ABTx266 antibody are located on either side of each of the CDRs in VH and VL region sequences shown supra. In particular, the four FRs of the ABTx266 antibody VH region are as follows:

VH FR1:
(SEQ ID NO: 426)
QVQLVQSGAAVKKPGESLKISCKGS;
VH FR2:
(SEQ ID NO: 427)
IGWVRQMPGKGLEWMGI;
and
VH FR3:
(SEQ ID NO: 428)
RYSPSFQGQVTISAGKSISTAYLQWSSLKASDTAMYYC
or
(SEQ ID NO: 973)
YSPSFQGQVTISAGKSISTAYLQWSSLKASDTAMYYC;
VH FR4:
(SEQ ID NO: 429)
WGQGTMVTVSS.

[0231] The four FRs of the ABTx266 antibody VL region are as follows:

VL FR1:
(SEQ ID NO: 430)
AIQLTQSPSSLSASVGDRVTITCRAS;
VL FR2:
(SEQ ID NO: 431)
LAWYQQKPGKAPKLLIY;
VL FR3:
(SEQ ID NO: 432)
SLESGVPSRFSGSGSGTDFTLTISSLQPEDFATYYC;
and
VL FR4:
(SEQ ID NO: 433)
FGGGTKVEIKRTV.

[0232] By “ABTx266 polynucleotide” is meant a nucleic acid molecule (e.g., DNA) encoding at least a fragment of an ABTx266 antibody. In an embodiment, the encoded fragment has antigen binding activity.

[0233] By “ABTx267” is meant an antibody having at least about 85% amino acid sequence identity to an antibody sequence of antibody ABTx267 or comprising VH and/or VL CDRs 1-3 of ABTx267 or antigen binding fragments thereof, wherein each of the antibody, CDRs, and antigen binding fragments specifically bind to a wild type CD117 polypeptide but fail to detectably bind or have only reduced binding to an altered CD117 polypeptide. In embodiments, the antibody or antigen binding fragment thereof has at least 90%, 93%, 95%, 98%, 99% or 100% amino acid sequence identity to an antibody sequence of antibody ABTx267. Exemplary heavy chain and light chain sequences for antibody ABTx267 are provided below, where the variable regions are in plain text, the constant domains are in bold, and complementarity determining regions (CDRs), i.e., CDR1, CDR2, and CDR2, are underlined:

ABTx267 heavy chain (HC):
(SEQ ID NO: 1030)
QVQLVQSGAAVKKPGESLKISCKGSGYRFTSYWIGWVRQMPGKGL
EWMGIIYPGDSDTKYSPSFQGQVTISAGKSISTAYLQWSSLKASD
TAMYYCARHGRGYDAYDGAFDIWGQGTMVTVSSASTKGPSVFPLA
PSSKSTSGGTAALGCLVKDYFPEPVTVSWNSGALTSGVHTFPAVL
QSSGLYSLSSVVTVPSSSLGTQTYICNVNHKPSNTKVDKKVEPKS
CDKTHTCPPCPAPELLGGPSVFLFPPKPKDTLMISRTPEVTCVVV
DVSHEDPEVKFNWYVDGVEVHNAKTKPREEQYNSTYRVVSVLTVL
HQDWLNGKEYKCKVSNKALPAPIEKTISKAKGQPREPQVYTLPPS
RDELTKNQVSLTCLVKGFYPSDIAVEWESNGQPENNYKTTPPVLD
SDGSFFLYSKLTVDKSRWQQGNVFSCSVMHEALHNHYTQKSLSLS
PG
ABTx267 light chain (LC):
(SEQ ID NO: 1048)
AIQLTQSPSSLSASVGDRVTITCRASQGISSALAWYQQKPGKAPK
LLIYDASSLESGVPSRFSGSGSGTDFTLTISSLQPEDFATYYCQQ
TNSSPLTFGGGTKVEIKRTVAAPSVFIFPPSDEQLKSGTASVVCL
LNNFYPREAKVQWKVDNALQSGNSQESVTEQDSKDSTYSLSSTLT
LSKADYEKHKVYACEVTHQGLSSPVTKSFNRGEC.

[0234] The three CDRs of the ABTx267 antibody VH region are as follows:

VH CDR1:
(SEQ ID NO: 421)
GYRFTSYW;
VH CDR2:
(SEQ ID NO: 972)
IYPGDSDTK;
and
VH CDR3:
(SEQ ID NO: 1032)
ARHGRGYDAYDGAFDI.

[0235] The three CDRs of the ABTx267 antibody VL region are as follows:

VL CDR1:
(SEQ ID NO: 424)
QGISSA;
VL CDR2:
DAS;
and
VL CDR3:
(SEQ ID NO: 1050)
QQTNSSPLT.

[0236] The four framework (FR) regions, i.e., FR1, FR2, FR3, and FR4, of the ABTx267 antibody are located on either side of each of the CDRs in VH and VL region sequences shown supra. In particular, the four FRs of the ABTx267 antibody VH region are as follows:

VH FR1:
(SEQ ID NO: 426)
QVQLVQSGAAVKKPGESLKISCKGS;
VH FR2:
(SEQ ID NO: 427)
IGWVRQMPGKGLEWMGI;
and
VH FR3:
(SEQ ID NO: 428)
RYSPSFQGQVTISAGKSISTAYLQWSSLKASDTAMYYC
or
(SEQ ID NO: 973)
YSPSFQGQVTISAGKSISTAYLQWSSLKASDTAMYYC;
VH FR4:
(SEQ ID NO: 429)
WGQGTMVTVSS.

[0237] The four FRs of the ABTx267 antibody VL region are as follows:

VL FR1:
(SEQ ID NO: 430)
AIQLTQSPSSLSASVGDRVTITCRAS;
VL FR2:
(SEQ ID NO: 431)
LAWYQQKPGKAPKLLIY;
VL FR3:
(SEQ ID NO: 432)
SLESGVPSRFSGSGSGTDFTLTISSLQPEDFATYYC;
and
VL FR4:
(SEQ ID NO: 433)
FGGGTKVEIKRTV.

[0238] By “ABTx267 polynucleotide” is meant a nucleic acid molecule (e.g., DNA) encoding at least a fragment of an ABTx267 antibody. In an embodiment, the encoded fragment has antigen binding activity.

[0239] By “ABTx268” is meant an antibody having at least about 85% amino acid sequence identity to an antibody sequence of antibody ABTx268 or comprising VH and/or VL CDRs 1-3 of ABTx268 or antigen binding fragments thereof, wherein each of the antibody, CDRs, and antigen binding fragments specifically bind to a wild type CD117 polypeptide but fail to detectably bind or have only reduced binding to an altered CD117 polypeptide. In embodiments, the antibody or antigen binding fragment thereof has at least 90%, 93%, 95%, 98%, 99% or 100% amino acid sequence identity to an antibody sequence of antibody ABTx268. Exemplary heavy chain and light chain sequences for antibody ABTx268 are provided below, where the variable regions are in plain text, the constant domains are in bold, and complementarity determining regions (CDRs), i.e., CDR1, CDR2, and CDR2, are underlined:

ABTx268 heavy chain (HC):
(SEQ ID NO: 1016)
QVQLVQSGAAVKKPGESLKISCKGSGYRFTSYWIGWVRQMPGKGL
EWMGIIYPGDSDTKYSPSFQGQVTISAGKSISTAYLQWSSLKASD
TAMYYCARHGRGYDGYEGAFDIWGQGTMVTVSSASTKGPSVFPLA
PSSKSTSGGTAALGCLVKDYFPEPVTVSWNSGALTSGVHTFPAVL
QSSGLYSLSSVVTVPSSSLGTQTYICNVNHKPSNTKVDKKVEPKS
CDKTHTCPPCPAPELLGGPSVFLFPPKPKDTLMISRTPEVTCVVV
DVSHEDPEVKFNWYVDGVEVHNAKTKPREEQYNSTYRVVSVLTVL
HQDWLNGKEYKCKVSNKALPAPIEKTISKAKGQPREPQVYTLPPS
RDELTKNQVSLTCLVKGFYPSDIAVEWESNGQPENNYKTTPPVLD
SDGSFFLYSKLTVDKSRWQQGNVFSCSVMHEALHNHYTQKSLS
LSPG
ABTx268 light chain (LC):
(SEQ ID NO: 1049)
AIQLTQSPSSLSASVGDRVTITCRASQGISSALAWYQQKPGKAPK
LLIYDASSLESGVPSRFSGSGSGTDFTLTISSLQPEDFATYYCQQ
VNSYPLTFGGGTKVEIKRTVAAPSVFIFPPSDEQLKSGTASVVCL
LNNFYPREAKVQWKVDNALQSGNSQESVTEQDSKDSTYSLSSTLT
LSKADYEKHKVYACEVTHQGLSSPVTKSENRGEC

[0240] The three CDRs of the ABTx268 antibody VH region are as follows:

VH CDR1:
(SEQ ID NO: 421)
GYRFTSYW;
VH CDR2:
(SEQ ID NO: 972)
IYPGDSDTK;
and
VH CDR3:
(SEQ ID NO: 948)
ARHGRGYDGYEGAFDI.

[0241] The three CDRs of the ABTx268 antibody VL region are as follows:

VL CDR1:
(SEQ ID NO: 424)
QGISSA;
VL CDR2:
DAS;
and
VL CDR3:
(SEQ ID NO: 952)
QQVNSYPLT.

[0242] The four framework (FR) regions, i.e., FR1, FR2, FR3, and FR4, of the ABTx268 antibody are located on either side of each of the CDRs in VH and VL region sequences shown supra. In particular, the four FRs of the ABTx268 antibody VH region are as follows:

VH FR1:
(SEQ ID NO: 426)
QVQLVQSGAAVKKPGESLKISCKGS;
VH FR2:
(SEQ ID NO: 427)
IGWVRQMPGKGLEWMGI;
and
VH FR3:
(SEQ ID NO: 428)
RYSPSFQGQVTISAGKSISTAYLQWSSLKASDTAMYYC
or
(SEQ ID NO: 973)
YSPSFQGQVTISAGKSISTAYLQWSSLKASDTAMYYC;
VH FR4:
(SEQ ID NO: 429)
WGQGTMVTVSS.

[0243] The four FRs of the ABTx268 antibody VL region are as follows:

VL FR1:
(SEQ ID NO: 430)
AIQLTQSPSSLSASVGDRVTITCRAS;
VL FR2:
(SEQ ID NO: 431)
LAWYQQKPGKAPKLLIY;
VL FR3:
(SEQ ID NO: 432)
SLESGVPSRFSGSGSGTDFTLTISSLQPEDFATYYC;
and
VL FR4:
(SEQ ID NO: 433)
FGGGTKVEIKRTV.

[0244] By “ABTx268 polynucleotide” is meant a nucleic acid molecule (e.g., DNA) encoding at least a fragment of an ABTx268 antibody. In an embodiment, the encoded fragment has antigen binding activity.

[0245] By “ABTx269” is meant an antibody having at least about 85% amino acid sequence identity to an antibody sequence of antibody ABTx269 or comprising VH and/or VL CDRs 1-3 of ABTx269 or antigen binding fragments thereof, wherein each of the antibody, CDRs, and antigen binding fragments specifically bind to a wild type CD117 polypeptide but fail to detectably bind or have only reduced binding to an altered CD117 polypeptide. In embodiments, the antibody or antigen binding fragment thereof has at least 90%, 93%, 95%, 98%, 99% or 100% amino acid sequence identity to an antibody sequence of antibody ABTx269. Exemplary heavy chain and light chain sequences for antibody ABTx269 are provided below, where the variable regions are in plain text, the constant domains are in bold, and complementarity determining regions (CDRs), i.e., CDR1, CDR2, and CDR2, are underlined:

ABTx269 heavy chain (HC):
(SEQ ID NO: 1016)
QVQLVQSGAAVKKPGESLKISCKGSGYRFTSYWIGWVRQMPGKGLEWMG
IIYPGDSDTKYSPSFQGQVTISAGKSISTAYLQWSSLKASDTAMYYCAR
HGRGYDGYEGAFDIWGQGTMVTVSSASTKGPSVFPLAPSSKSTSGGTAA
LGCLVKDYFPEPVTVSWNSGALTSGVHTFPAVLQSSGLYSLSSVVTVPS
SSLGTQTYICNVNHKPSNTKVDKKVEPKSCDKTHTCPPCPAPELLGGPS
VFLFPPKPKDTLMISRTPEVTCVVVDVSHEDPEVKFNWYVDGVEVHNAK
TKPREEQYNSTYRVVSVLTVLHQDWLNGKEYKCKVSNKALPAPIEKTIS
KAKGQPREPQVYTLPPSRDELTKNQVSLTCLVKGFYPSDIAVEWESNGQ
PENNYKTTPPVLDSDGSFFLYSKLTVDKSRWQQGNVFSCSVMHEALHNH
YTQKSLSLSPG
ABTx269 light chain (LC):
(SEQ ID NO: 1041)
AIQLTQSPSSLSASVGDRVTITCRASQGISSALAWYQQKPGKAPKLLIY
DASSLESGVPSRFSGSGSGTDFTLTISSLQPEDFATYYCQQVYSYPLTF
GGGTKVEIKRTVAAPSVFIFPPSDEQLKSGTASVVCLLNNFYPREAKVQ
WKVDNALQSGNSQESVTEQDSKDSTYSLSSTLTLSKADYEKHKVYACEV
THQGLSSPVTKSFNRGEC.

[0246] The three CDRs of the ABTx269 antibody VH region are as follows:

VH CDR1:
(SEQ ID NO: 421)
GYRFTSYW;
VH CDR2:
(SEQ ID NO: 972)
IYPGDSDTK;
and
VH CDR3:
(SEQ ID NO: 948)
ARHGRGYDGYEGAFDI.

[0247] The three CDRs of the ABTx269 antibody VL region are as follows:

VL CDR1:
(SEQ ID NO: 424)
QGISSA;
VL CDR2:
DAS;
and
VL CDR3:
(SEQ ID NO: 1042)
QQVYSYPLT.

[0248] The four framework (FR) regions, i.e., FR1, FR2, FR3, and FR4, of the ABTx269 antibody are located on either side of each of the CDRs in VH and VL region sequences shown supra. In particular, the four FRs of the ABTx269 antibody VH region are as follows:

VH FR1:
(SEQ ID NO: 426)
QVQLVQSGAAVKKPGESLKISCKGS;
VH FR2:
(SEQ ID NO: 427)
IGWVRQMPGKGLEWMGI;
and
VH FR3:
(SEQ ID NO: 428)
RYSPSFQGQVTISAGKSISTAYLQWSSLKASDTAMYYC
or
(SEQ ID NO: 973)
YSPSFQGQVTISAGKSISTAYLQWSSLKASDTAMYYC;
VH FR4:
(SEQ ID NO: 429)
WGQGTMVTVSS.

[0249] The four FRs of the ABTx269 antibody VL region are as follows:

VL FR1:
(SEQ ID NO: 430)
AIQLTQSPSSLSASVGDRVTITCRAS;
VL FR2:
(SEQ ID NO: 431)
LAWYQQKPGKAPKLLIY;
VL FR3:
(SEQ ID NO: 432)
SLESGVPSRFSGSGSGTDFTLTISSLQPEDFATYYC;
and
VL FR4:
(SEQ ID NO: 433)
FGGGTKVEIKRTV.

[0250] By “ABTx269 polynucleotide” is meant a nucleic acid molecule (e.g., DNA) encoding at least a fragment of an ABTx269 antibody. In an embodiment, the encoded fragment has antigen binding activity.

[0251] By “ABTx270” is meant an antibody having at least about 85% amino acid sequence identity to an antibody sequence of antibody ABTx270 or comprising VH and/or VL CDRs 1-3 of ABTx270 or antigen binding fragments thereof, wherein each of the antibody, CDRs, and antigen binding fragments specifically bind to a wild type CD117 polypeptide but fail to detectably bind or have only reduced binding to an altered CD117 polypeptide. In embodiments, the antibody or antigen binding fragment thereof has at least 90%, 93%, 95%, 98%, 99% or 100% amino acid sequence identity to an antibody sequence of antibody ABTx270. Exemplary heavy chain and light chain sequences for antibody ABTx270 are provided below, where the variable regions are in plain text, the constant domains are in bold, and complementarity determining regions (CDRs), i.e., CDR1, CDR2, and CDR2, are underlined:

ABTx270 heavy chain (HC):
(SEQ ID NO: 1026)
QVQLVQSGAAVKKPGESLKISCKGSGYRFTSYWIGWVRQMPGKGLEWMG
IIYPGDSDTRYSPSFQGQVTISAGKSISTAYLQWSSLKASDTAMYYCAR
HGRGYDAYEGAFDIWGQGTMVTVSSASTKGPSVFPLAPSSKSTSGGTAA
LGCLVKDYFPEPVTVSWNSGALTSGVHTFPAVLQSSGLYSLSSVVTVPS
SSLGTQTYICNVNHKPSNTKVDKKVEPKSCDKTHTCPPCPAPELLGGPS
VFLFPPKPKDTLMISRTPEVTCVVVDVSHEDPEVKFNWYVDGVEVHNAK
TKPREEQYNSTYRVVSVLTVLHQDWLNGKEYKCKVSNKALPAPIEKTIS
KAKGQPREPQVYTLPPSRDELTKNQVSLTCLVKGFYPSDIAVEWESNGQ
PENNYKTTPPVLDSDGSFFLYSKLTVDKSRWQQGNVFSCSVMHEALHNH
YTQKSLSLSPG
ABTx270 light chain (LC):
(SEQ ID NO: 1024)
AIQLTQSPSSLSASVGDRVTITCRASQGISSALAWYQQKPGKAPKLLIY
DASSLESGVPSRFSGSGSGTDFTLTISSLQPEDFATYYCQQVRSYPLTF
GGGTKVEIKRTVAAPSVFIFPPSDEQLKSGTASVVCLLNNFYPREAKVQ
WKVDNALQSGNSQESVTEQDSKDSTYSLSSTLTLSKADYEKHKVYACEV
THQGLSSPVTKSFNRGEC.

[0252] The three CDRs of the ABTx270 antibody VH region are as follows:

VH CDR1:
(SEQ ID NO: 421)
GYRFTSYW;
VH CDR2:
(SEQ ID NO: 958)
IYPGDSDTR;
and
VH CDR3:
(SEQ ID NO: 1027)
ARHGRGYDAYEGAFDI.

[0253] The three CDRs of the ABTx270 antibody VL region are as follows:

VL CDR1:
(SEQ ID NO: 424)
QGISSA;
VL CDR2:
DAS;
and
VL CDR3:
(SEQ ID NO: 1025)
QQVRSYPLT.

[0254] The four framework (FR) regions, i.e., FR1, FR2, FR3, and FR4, of the ABTx270 antibody are located on either side of each of the CDRs in VH and VL region sequences shown supra. In particular, the four FRs of the ABTx270 antibody VH region are as follows:

VH FR1:
(SEQ ID NO: 426)
QVQLVQSGAAVKKPGESLKISCKGS;
VH FR2:
(SEQ ID NO: 427)
IGWVRQMPGKGLEWMGI;
and
VH FR3:
(SEQ ID NO: 428)
RYSPSFQGQVTISAGKSISTAYLQWSSLKASDTAMYYC
or
(SEQ ID NO: 973)
YSPSFQGQVTISAGKSISTAYLQWSSLKASDTAMYYC;
VH FR4:
(SEQ ID NO: 429)
WGQGTMVTVSS.

[0255] The four FRs of the ABTx270 antibody VL region are as follows:

VL FR1:
(SEQ ID NO: 430)
AIQLTQSPSSLSASVGDRVTITCRAS;
VL FR2:
(SEQ ID NO: 431)
LAWYQQKPGKAPKLLIY;
VL FR3:
(SEQ ID NO: 432)
SLESGVPSRFSGSGSGTDFTLTISSLQPEDFATYYC;
and
VL FR4:
(SEQ ID NO: 433)
FGGGTKVEIKRTV.

[0256] By “ABTx270 polynucleotide” is meant a nucleic acid molecule (e.g., DNA) encoding at least a fragment of an ABTx270 antibody. In an embodiment, the encoded fragment has antigen binding activity.

[0257] By “ABTx271” is meant an antibody having at least about 85% amino acid sequence identity to an antibody sequence of antibody ABTx271 or comprising VH and/or VL CDRs 1-3 of ABTx271 or antigen binding fragments thereof, wherein each of the antibody, CDRs, and antigen binding fragments specifically bind to a wild type CD117 polypeptide but fail to detectably bind or have only reduced binding to an altered CD117 polypeptide. In embodiments, the antibody or antigen binding fragment thereof has at least 90%, 93%, 95%, 98%, 99% or 100% amino acid sequence identity to an antibody sequence of antibody ABTx271. Exemplary heavy chain and light chain sequences for antibody ABTx271 are provided below, where the variable regions are in plain text, the constant domains are in bold, and complementarity determining regions (CDRs), i.e., CDR1, CDR2, and CDR2, are underlined:

ABTx271 heavy chain (HC):
(SEQ ID NO: 1043)
QVQLVQSGAAVKKPGESLKISCKGSGYRFTSYWIGWVRQMPGKGLEWMG
IIYPGDSDTRYSPSFQGQVTISAGKSISTAYLQWSSLKASDTAMYYCAR
HGRGYDAYDGAFDIWGQGTMVTVSSASTKGPSVFPLAPSSKSTSGGTAA
LGCLVKDYFPEPVTVSWNSGALTSGVHTFPAVLQSSGLYSLSSVVTVPS
SSLGTQTYICNVNHKPSNTKVDKKVEPKSCDKTHTCPPCPAPELLGGPS
VFLFPPKPKDTLMISRTPEVTCVVVDVSHEDPEVKFNWYVDGVEVHNAK
TKPREEQYNSTYRVVSVLTVLHQDWLNGKEYKCKVSNKALPAPIEKTIS
KAKGQPREPQVYTLPPSRDELTKNQVSLTCLVKGFYPSDIAVEWESNGQ
PENNYKTTPPVLDSDGSFFLYSKLTVDKSRWQQGNVFSCSVMHEALHNH
YTQKSLSLSPG
ABTx271 light chain (LC):
(SEQ ID NO: 1031)
AIQLTQSPSSLSASVGDRVTITCRASQGISSALAWYQQKPGKAPKLLIY
DASSLESGVPSRFSGSGSGTDFTLTISSLQPEDFATYYCQQTNSYPLTF
GGGTKVEIKRTVAAPSVFIFPPSDEQLKSGTASVVCLLNNFYPREAKVQ
WKVDNALQSGNSQESVTEQDSKDSTYSLSSTLTLSKADYEKHKVYACEV
THQGLSSPVTKSFNRGEC.

[0258] The three CDRs of the ABTx271 antibody VH region are as follows:

VH CDR1:
(SEQ ID NO: 421)
GYRFTSYW;
VH CDR2:
(SEQ ID NO: 958)
IYPGDSDTR;
and
VH CDR3:
(SEQ ID NO: 1032)
ARHGRGYDAYDGAFDI.
The three CDRs of the ABTx271 antibody VL region
are as follows:
VL CDR1:
(SEQ ID NO: 424)
QGISSA;
VL CDR2:
DAS;
and
VL CDR3:
(SEQ ID NO: 1044)
QQTNSYPLT.

[0259] The four framework (FR) regions, i.e., FR1, FR2, FR3, and FR4, of the ABTx271 antibody are located on either side of each of the CDRs in VH and VL region sequences shown supra. In particular, the four FRs of the ABTx271 antibody VH region are as follows:

VH FR1:
(SEQ ID NO: 426)
QVQLVQSGAAVKKPGESLKISCKGS;
VH FR2:
(SEQ ID NO: 427)
IGWVRQMPGKGLEWMGI;
and
VH FR3:
(SEQ ID NO: 428)
RYSPSFQGQVTISAGKSISTAYLQWSSLKASDTAMYYC
or
(SEQ ID NO: 973)
YSPSFQGQVTISAGKSISTAYLQWSSLKASDTAMYYC;
VH FR4:
(SEQ ID NO: 429)
WGQGTMVTVSS.

[0260] The four FRs of the ABTx271 antibody VL region are as follows:

VL FR1:
(SEQ ID NO: 430)
AIQLTQSPSSLSASVGDRVTITCRAS;
VL FR2:
(SEQ ID NO: 431)
LAWYQQKPGKAPKLLIY;
VL FR3:
(SEQ ID NO: 432)
SLESGVPSRFSGSGSGTDFTLTISSLQPEDFATYYC;
and
VL FR4:
(SEQ ID NO: 433)
FGGGTKVEIKRTV.

[0261] By “ABTx271 polynucleotide” is meant a nucleic acid molecule (e.g., DNA) encoding at least a fragment of an ABTx271 antibody. In an embodiment, the encoded fragment has antigen binding activity.

[0262] By “ABTx272” is meant an antibody having at least about 85% amino acid sequence identity to an antibody sequence of antibody ABTx272 or comprising VH and/or VL CDRs 1-3 of ABTx272 or antigen binding fragments thereof, wherein each of the antibody, CDRs, and antigen binding fragments specifically bind to a wild type CD117 polypeptide but fail to detectably bind or have only reduced binding to an altered CD117 polypeptide. In embodiments, the antibody or antigen binding fragment thereof has at least 90%, 93%, 95%, 98%, 99% or 100% amino acid sequence identity to an antibody sequence of antibody ABTx272. Exemplary heavy chain and light chain sequences for antibody ABTx272 are provided below, where the variable regions are in plain text, the constant domains are in bold, and complementarity determining regions (CDRs), i.e., CDR1, CDR2, and CDR2, are underlined:

ABTx272 heavy chain (HC):
(SEQ ID NO: 1021)
QVQLVQSGAAVKKPGESLKISCKGSGYRFTSYWIGWVRQMPGKGLEWMGIIYPGDSDTKYSPSF
QGQVTISAGKSISTAYLQWSSLKASDTAMYYCARHGRGYDGYDGAFDIWGQGTMVTVSSASTKG
PSVFPLAPSSKSTSGGTAALGCLVKDYFPEPVTVSWNSGALTSGVHTFPAVLQSSGLYSLSSVV
TVPSSSLGTQTYICNVNHKPSNTKVDKKVEPKSCDKTHTCPPCPAPELLGGPSVFLFPPKPKDT
LMISRTPEVTCVVVDVSHEDPEVKFNWYVDGVEVHNAKTKPREEQYNSTYRVVSVLTVLHQDWL
NGKEYKCKVSNKALPAPIEKTISKAKGQPREPQVYTLPPSRDELTKNQVSLTCLVKGFYPSDIA
VEWESNGQPENNYKTTPPVLDSDGSFFLYSKLTVDKSRWQQGNVFSCSVMHEALHNHYTOKSLS
LSPG
ABTx272 light chain (LC):
(SEQ ID NO: 1024)
AIQLTQSPSSLSASVGDRVTITCRASQGISSALAWYQQKPGKAPKLLIYDASSLESGVPSRFSG
SGSGTDFTLTISSLQPEDFATYYCQQVRSYPLTFGGGTKVEIKRTVAAPSVFIFPPSDEQLKSG
TASVVCLLNNFYPREAKVQWKVDNALQSGNSQESVTEQDSKDSTYSLSSTLTLSKADYEKHKVY
ACEVTHQGLSSPVTKSENRGEC

[0263] The three CDRs of the ABTx272 antibody VH region are as follows:

```
  (SEQ ID NO: 421)
VH CDR1: GYRFTSYW;
  (SEQ ID NO: 972)
VH CDR2: IYPGDSDTK;
and
(SEQ ID NO: 1012)
VH CDR3: ARHGRGYDGYDGAFDI.
```

[0264] The three CDRs of the ABTx272 antibody VL region are as follows:

(SEQ ID NO: 424)
VL CDR1: QGISSA;
VL CDR2: DAS;
and
(SEQ ID NO: 1025)
VL CDR3: QQVRSYPLT

[0265] The four framework (FR) regions, i.e., FR1, FR2, FR3, and FR4, of the ABTx272 antibody are located on either side of each of the CDRs in VH and VL region sequences shown supra. In particular, the four FRs of the ABTx272 antibody VH region are as follows:

```
  (SEQ ID NO: 426)
VH FR1: QVQLVQSGAAVKKPGESLKISCKGS;
  (SEQ ID NO: 427)
VH FR2: IGWVRQMPGKGLEWMGI;
and
  (SEQ ID NO: 428)
VH FR3: RYSPSFQGQVTISAGKSISTAYLQWSSLKASDTAMYYC
or
  (SEQ ID NO: 973)
YSPSFQGQVTISAGKSISTAYLQWSSLKASDTAMYYC;
(SEQ ID NO: 429)
VH FR4: WGQGTMVTVSS.
```

[0266] The four FRs of the ABTx272 antibody VL region are as follows:

```
  (SEQ ID NO: 430)
VL FR1: AIQLTQSPSSLSASVGDRVTITCRAS;
  (SEQ ID NO: 431)
VL FR2: LAWYQQKPGKAPKLLIY;
  (SEQ ID NO: 432)
VL FR3: SLESGVPSRFSGSGSGTDFTLTISSLQPEDFATYYC;
and
(SEQ ID NO: 433)
VL FR4: FGGGTKVEIKRTV.
```

[0267] By “ABTx272 polynucleotide” is meant a nucleic acid molecule (e.g., DNA) encoding at least a fragment of an ABTx272 antibody. In an embodiment, the encoded fragment has antigen binding activity.

[0268] By “ABTx273” is meant an antibody having at least about 85% amino acid sequence identity to an antibody sequence of antibody ABTx273 or comprising VH and/or VL CDRs 1-3 of ABTx273 or antigen binding fragments thereof, wherein each of the antibody, CDRs, and antigen binding fragments specifically bind to a wild type CD117 polypeptide but fail to detectably bind or have only reduced binding to an altered CD117 polypeptide. In embodiments, the antibody or antigen binding fragment thereof has at least 90%, 93%, 95%, 98%, 99% or 100% amino acid sequence identity to an antibody sequence of antibody ABTx273. Exemplary heavy chain and light chain sequences for antibody ABTx273 are provided below, where the variable regions are in plain text, the constant domains are in bold, and complementarity determining regions (CDRs), i.e., CDR1, CDR2, and CDR2, are underlined:

ABTx273 heavy chain (HC):
(SEQ ID NO: 1013)
QVQLVQSGAAVKKPGESLKISCKGSGYRFTSYWIGWVRQMPGKGLEWMGIIYPGDSDTRYSPSF
QGQVTISAGKSISTAYLQWSSLKASDTAMYYCARHGRGYDGYEGAFDIWGQGTMVTVSSASTKG
PSVFPLAPSSKSTSGGTAALGCLVKDYFPEPVTVSWNSGALTSGVHTFPAVLOSSGLYSLSSVV
TVPSSSLGTQTYICNVNHKPSNTKVDKKVEPKSCDKTHTCPPCPAPELLGGPSVFLFPPKPKDT
LMISRTPEVTCVVVDVSHEDPEVKFNWYVDGVEVHNAKTKPREEQYNSTYRVVSVLTVLHQDWL
NGKEYKCKVSNKALPAPIEKTISKAKGQPREPQVYTLPPSRDELTKNQVSLTCLVKGFYPSDIA
VEWESNGQPENNYKTTPPVLDSDGSFFLYSKLTVDKSRWQQGNVFSCSVMHEALHNHYTQKSLS
LSPG
ABTx273 light chain (LC):
(SEQ ID NO: 1045)
AIQLTQSPSSLSASVGDRVTITCRASQGISSALAWYQQKPGKAPKLLIYDASSLESGVPSRFSG
SGSGTDFTLTISSLQPEDFATYYCQQFRSYPLTFGGGTKVEIKRTVAAPSVFIFPPSDEQLKSG
TASVVCLLNNFYPREAKVQWKVDNALQSGNSQESVTEQDSKDSTYSLSSTLTLSKADYEKHKVY
ACEVTHQGLSSPVTKSFNRGEC.

[0269] The three CDRs of the ABTx273 antibody VH region are as follows:

```
  (SEQ ID NO: 421)
VH CDR1: GYRFTSYW;
  (SEQ ID NO: 958)
VH CDR2: IYPGDSDTR;
and
  (SEQ ID NO: 948)
VH CDR3: ARHGRGYDGYEGAFDI.
```

[0270] The three CDRs of the ABTx0273 antibody VL region are as follows:

(SEQ ID NO: 424)
VL CDR1: QGISSA;
VL CDR2: DAS;
and
(SEQ ID NO: 953)
VL CDR3: QQFRSYPLT

[0271] The four framework (FR) regions, i.e., FR1, FR2, FR3, and FR4, of the ABTx273 antibody are located on either side of each of the CDRs in VH and VL region sequences shown supra. In particular, the four FRs of the ABTx273 antibody VH region are as follows:

```
  (SEQ ID NO: 426)
VH FRI: QVQLVQSGAAVKKPGESLKISCKGS;
  (SEQ ID NO: 427)
VH FR2: IGWVRQMPGKGLEWMGI;
and
  (SEQ ID NO: 428)
VH FR3: RYSPSFQGQVTISAGKSISTAYLOWSSLKASDTAMYYC
or
  (SEQ ID NO: 973)
YSPSFQGQVTISAGKSISTAYLQWSSLKASDTAMYYC;
(SEQ ID NO: 429)
VH FR4: WGQGTMVTVSS
```

[0272] The four FRs of the ABTx273 antibody VL region are as follows:

```
  (SEQ ID NO: 430)
VL FRI: AIQLTQSPSSLSASVGDRVTITCRAS;
  (SEQ ID NO: 431)
VL FR2: LAWYQQKPGKAPKLLIY;
  (SEQ ID NO: 432)
VL FR3: SLESGVPSRFSGSGSGTDFTLTISSLQPEDFATYYC;
and
(SEQ ID NO: 433)
VL FR4: FGGGTKVEIKRTV
```

[0273] By “ABTx273 polynucleotide” is meant a nucleic acid molecule (e.g., DNA) encoding at least a fragment of an ABTx273 antibody. In an embodiment, the encoded fragment has antigen binding activity.

[0274] By “ABTx274” is meant an antibody having at least about 85% amino acid sequence identity to an antibody sequence of antibody ABTx274 or comprising VH and/or VL CDRs 1-3 of ABTx274 or antigen binding fragments thereof, wherein each of the antibody, CDRs, and antigen binding fragments specifically bind to a wild type CD117 polypeptide but fail to detectably bind or have only reduced binding to an altered CD117 polypeptide. In embodiments, the antibody or antigen binding fragment thereof has at least 90%, 93%, 95%, 98%, 99% or 100% amino acid sequence identity to an antibody sequence of antibody ABTx274. Exemplary heavy chain and light chain sequences for antibody ABTx274 are provided below, where the variable regions are in plain text, the constant domains are in bold, and complementarity determining regions (CDRs), i.e., CDR1, CDR2, and CDR2, are underlined:

```
ABTx274 hevy chain (HC):
  (SEQ ID NO: 1016)
QVQLVQSGAAVKKPGESLKISCKGSGYRFTSYWIGWVRQMPGKGLEWMGIIYPGDSDTKYSPSF
QGQVTISAGKSISTAYLQWSSLKASDTAMYYCARHGRGYDGYEGAFDIWGQGTMVTVSSASTKG
PSVFPLAPSSKSTSGGTAALGCLVKDYFPEPVTVSWNSGALTSGVHTFPAVLQSSGLYSLSSVV
TVPSSSLGTQTYICNVNHKPSNTKVDKKVEPKSCDKTHTCPPCPAPELLGGPSVFLFPPKPKDT
LMISRTPEVTCVVVDVSHEDPEVKFNWYVDGVEVHNAKTKPREEQYNSTYRVVSVLTVLHQDWL
NGKEYKCKVSNKALPAPIEKTISKAKGQPREPQVYTLPPSRDELTKNQVSLTCLVKGFYPSDIA
VEWESNGQPENNYKTTPPVLDSDGSFFLYSKLTVDKSRWQQGNVFSCSVMHEALHNHYTOKSLS
LSPG
ABTx274 light chain (LC):
  (SEQ ID NO: 1031)
AIQLTQSPSSLSASVGDRVTITCRASQGISSALAWYQQKPGKAPKLLIYDASSLESGVPSRFSG
SGSGTDFTLTISSLQPEDFATYYCQQTNSYPLTFGGGTKVEIKRTVAAPSVFIFPPSDEQLKSG
TASVVCLLNNFYPREAKVQWKVDNALQSGNSQESVTEQDSKDSTYSLSSTLTLSKADYEKHKVY
ACEVTHQGLSSPVTKSENRGEC.
```

[0275] The three CDRs of the ABTx274 antibody VH region are as follows:

```
  (SEQ ID NO: 421)
VH CDR1: GYRFTSYW;
(SEQ ID NO: 972)
VH CDR2: IYPGDSDTK;
and
  (SEQ ID NO: 948)
VH CDR3: ARHGRGYDGYEGAFDI.
The three CDRs of the ABTx274 antibody
VL region are as follows:
  (SEQ ID NO: 424)
VL CDR1: QGISSA;
VL CDR2: DAS;
and
(SEQ ID NO: 1044)
VL CDR3: QQTNSYPLT
```

[0276] The four framework (FR) regions, i.e., FR1, FR2, FR3, and FR4, of the ABTx274 antibody are located on either side of each of the CDRs in VH and VL region sequences shown supra. In particular, the four FRs of the ABTx274 antibody VH region are as follows:

```
  (SEQ ID NO: 426)
VH FRI: QVQLVQSGAAVKKPGESLKISCKGS;
  (SEQ ID NO: 427)
VH FR2: IGWVRQMPGKGLEWMGI;
and
  (SEQ ID NO: 428)
VH FR3: RYSPSFQGQVTISAGKSISTAYLQWSSLKASDTAMYYC
or
  (SEQ ID NO: 973)
YSPSFQGQVTISAGKSISTAYLQWSSLKASDTAMYYC;
(SEQ ID NO: 429)
VH FR4: WGQGTMVTVSS
```

[0277] The four FRs of the ABTx274 antibody VL region are as follows:

```
  (SEQ ID NO: 430)
VL FR1: AIQLTQSPSSLSASVGDRVTITCRAS;
(SEQ ID NO: 431)
VL FR2: LAWYQQKPGKAPKLLI;
  (SEQ ID NO: 432)
VL FR3: SLESGVPSRFSGSGSGTDFTLTISSLQPEDFATYYC;
and
(SEQ ID NO: 433)
VL FR4: FGGGTKVEIKRTV
```

[0278] By “ABTx274 polynucleotide” is meant a nucleic acid molecule (e.g., DNA) encoding at least a fragment of an ABTx274 antibody. In an embodiment, the encoded fragment has antigen binding activity.

[0279] By “ABTx313” is meant an antibody having at least about 85% amino acid sequence identity to an antibody sequence of antibody ABTx313 or comprising VH and/or VL CDRs 1-3 of ABTx313 or antigen binding fragments thereof, wherein each of the antibody, CDRs, and antigen binding fragments specifically bind to a wild type CD117 polypeptide but fail to detectably bind or have only reduced binding to an altered CD117 polypeptide. In embodiments, the antibody or antigen binding fragment thereof has at least 90%, 93%, 95%, 98%, 99% or 100% amino acid sequence identity to an antibody sequence of antibody ABTx313. Exemplary heavy chain and light chain sequences for antibody ABTx313 are provided below, where the variable regions are in plain text, the constant domains are in bold, and complementarity determining regions (CDRs), i.e., CDR1, CDR2, and CDR2, are underlined:

ABTx313 heavy chain (HC):
(SEQ ID NO: 1051)
QVQLVQSGAAVKKPGESLKISCKGSGYRFTSYWIGWVRQMPGKGLEWMGIIYPGDSDTRYSPSF
QGQVTISAGKSISTAYLQWSSLKASDTAMYYCARHGRGYDGYDGAFDIWGQGTMVTVSSASTKG
PSVFPLAPSSKSTSGGTAALGCLVKDYFPEPVTVSWNSGALTSGVHTFPAVLQSSGLYSLSSVV
TVPSSSLGTQTYICNVNHKPSNTKVDKKVEPKSCDKTHTCPPCPAPEAAGGPSVFLFPPKPKDT
LMISRTPEVTCVVVAVSHEDPEVKFNWYVDGVEVHNAKTKPREEQYNSTYRVVSVLTVLHQDWL
NGKEYKCKVSNKALPAPIEKTISKAKGQPREPQVYTLPPSRDELTKNQVSLTCLVKGFYPSDIA
VEWESNGQPENNYKTTPPVLDSDGSFFLYSKLTVDKSRWQQGNVFSCSVMHEALHNHYTOKSLS
LSPGK
ABTx313 light chain (LC):
(SEQ ID NO: 1019)
AIQLTQSPSSLSASVGDRVTITCRASQGISSALAWYQQKPGKAPKLLIYDASSLESGVPSRFSG
SGSGTDFTLTISSLQPEDFATYYCQQFSSYPLTFGGGTKVEIKRTVAAPSVFIFPPSDEQLKSG
TASVVCLLNNFYPREAKVQWKVDNALQSGNSQESVTEQDSKDSTYSLSSTLTLSKADYEKHKVY
ACEVTHQGLSSPVTKSENRGEC

[0280] The three CDRs of the ABTx313 VH region are as follows:

```
  (SEQ ID NO: 421)
VH CDR-1: GYRFTSYW
  (SEQ ID NO: 1053)
VH CDR-2: IYPGDSDTR
(SEQ ID NO: 1012)
VH CDR-3: ARHGRGYDGYDGAFDI
```

[0281] The three CDRs of the ABTx313 VL region are as follows:

```
  (SEQ ID NO: 424)
VL CDR-1: QGISSA
VL CDR-2: DAS
  (SEQ ID NO: 1020)
VL CDR-3: QQFSSYPLT
```

[0282] The four framework (FR) regions, i.e., FR1, FR2, FR3, and FR4, of the ABTx313 antibody are located on either side of each of the CDRs in VH and VL region sequences shown supra. In particular, the four FRs of the ABTx313 antibody VH region are as follows:

```
  (SEQ ID NO: 426)
VH FR1: QVQLVQSGAAVKKPGESLKISCKGS
  (SEQ ID NO: 427)
VH FR2: IGWVRQMPGKGLEWMGI
  (SEQ ID NO: 1059)
VH FR3: YSPSFQGQVTISAGKSISTAYLQWSSLKASDTAMYYC
(SEQ ID NO: 429)
VH FR4: WGQGTMVTVSS
```

[0283] The four FRs of the ABTx313 antibody VL region are as follows:

```
  (SEQ ID NO: 430)
VL FR1: AIQLTQSPSSLSASVGDRVTITCRAS
  (SEQ ID NO: 431)
VL FR2: LAWYQQKPGKAPKLLIY
  (SEQ ID NO: 432)
VL FR3: SLESGVPSRFSGSGSGTDFTLTISSLQPEDFATYYC
(SEQ ID NO: 433)
VL FR4: FGGGTKVEIKRTV
```

[0284] By “ABTx313 polynucleotide” is meant a nucleic acid molecule (e.g., DNA) encoding at least a fragment of an ABTx313 antibody. In an embodiment, the encoded fragment has antigen binding activity.

[0285] By “ABTx307” is meant an antibody having at least about 85% amino acid sequence identity to an antibody sequence of antibody ABTx307 or comprising VH and/or VL CDRs 1-3 of ABTx307 or antigen binding fragments thereof, wherein each of the antibody, CDRs, and antigen binding fragments specifically bind to a wild type CD117 polypeptide but fail to detectably bind or have only reduced binding to an altered CD117 polypeptide. In embodiments, the antibody or antigen binding fragment thereof has at least 90%, 93%, 95%, 98%, 99% or 100% amino acid sequence identity to an antibody sequence of antibody ABTx307. Exemplary heavy chain and light chain sequences for antibody ABTx307 are provided below, where the variable regions are in plain text, the constant domains are in bold, and complementarity determining regions (CDRs), i.e., CDR1, CDR2, and CDR2, are underlined:

```
ABTx307 heavy chain (HC):
  (SEQ ID NO: 1051)
QVQLVQSGAAVKKPGESLKISCKGSGYRFTSYWIGWVRQMPGKGLEWMGIIYPGDSDTRYSPSF
QGQVTISAGKSISTAYLOWSSLKASDTAMYYCARHGRGYDGYDGAFDIWGQGTMVTVSSASTKG
PSVFPLAPSSKSTSGGTAALGCLVKDYFPEPVTVSWNSGALTSGVHTFPAVLOSSGLYSLSSVV
TVPSSSLGTQTYICNVNHKPSNTKVDKKVEPKSCDKTHTCPPCPAPEAAGGPSVFLFPPKPKDT
LMISRTPEVTCVVVAVSHEDPEVKFNWYVDGVEVHNAKTKPREEQYNSTYRVVSVLTVLHQDWL
NGKEYKCKVSNKALPAPIEKTISKAKGQPREPQVYTLPPSRDELTKNQVSLTCLVKGFYPSDIA
VEWESNGQPENNYKTTPPVLDSDGSFFLYSKLTVDKSRWQQGNVFSCSVMHEALHNHYTOKSLS
LSPGK
ABTx307 light chain (LC) (VL):
  (SEQ ID NO: 420)
AIQLTQSPSSLSASVGDRVTITCRASQGISSALAWYQQKPGKAPKLLIYDASSLESGVPSRFSG
SGSGTDFTLTISSLQPEDFATYYCQQFNSYPLTFGGGTKVEIKRTVAAPSVFIFPPSDEQLKSG
TASVVCLLNNFYPREAKVQWKVDNALQSGNSQESVTEQDSKDSTYSLSSTLTLSKADYEKHKVY
ACEVTHQGLSSPVTKSENRGEC
```

[0286] The three CDRs of the ABTx307 VH region are as follows:

```
  (SEQ ID NO: 421)
VH CDR-1: GYRFTSYW
  (SEQ ID NO: 1053)
VH CDR-2: IYPGDSDTR
(SEQ ID NO: 1012)
VH CDR-3: ARHGRGYDGYDGAFDI
```

[0287] The three CDRs of the ABTx307 VL region are as follows:

(SEQ ID NO: 424)
VL CDR-1: QGISSA
VL CDR-2: DAS
(SEQ ID NO: 425)
VL CDR-3: QQFNSYPLT

[0288] The four framework (FR) regions, i.e., FR1, FR2, FR3, and FR4, of the ABTx307 antibody are located on either side of each of the CDRs in VH and VL region sequences shown supra. In particular, the four FRs of the ABTx307 antibody VH region are as follows:

```
  (SEQ ID NO: 426)
VH FR1: QVQLVQSGAAVKKPGESLKISCKGS
  (SEQ ID NO: 427)
VH FR2: IGWVRQMPGKGLEWMGI
  (SEQ ID NO: 1059)
VH FR3: YSPSFQGQVTISAGKSISTAYLQWSSLKASDTAMYYC
(SEQ ID NO: 429)
VH FR4: WGQGTMVTVSS
```

[0289] The four FRs of the ABTx307 antibody VL region are as follows:

```
  (SEQ ID NO: 430)
VL FRI: AIQLTQSPSSLSASVGDRVTITCRAS
  (SEQ ID NO: 431)
VL FR2: LAWYQQKPGKAPKLLIY
  (SEQ ID NO: 432)
VL FR3: SLESGVPSRFSGSGSGTDFTLTISSLQPEDFATYYC
(SEQ ID NO: 433)
VL FR4: FGGGTKVEIKRTV
```

[0290] By “ABTx307 polynucleotide” is meant a nucleic acid molecule (e.g., DNA) encoding at least a fragment of an ABTx307 antibody. In an embodiment, the encoded fragment has antigen binding activity.

[0291] By “ABTx308” is meant an antibody having at least about 85% amino acid sequence identity to an antibody sequence of antibody ABTx308 or comprising VH and/or VL CDRs 1-3 of ABTx308 or antigen binding fragments thereof, wherein each of the antibody, CDRs, and antigen binding fragments specifically bind to a wild type CD117 polypeptide but fail to detectably bind or have only reduced binding to an altered CD117 polypeptide. In embodiments, the antibody or antigen binding fragment thereof has at least 90%, 93%, 95%, 98%, 99% or 100% amino acid sequence identity to an antibody sequence of antibody ABTx308. Exemplary heavy chain and light chain sequences for antibody ABTx308 are provided below, where the variable regions are in plain text, the constant domains are in bold, and complementarity determining regions (CDRs), i.e., CDR1, CDR2, and CDR2, are underlined:

ABTx308 heavy chain (HC):
(SEQ ID NO: 1066)
QVQLVQSGAAVKKPGESLKISCKGSGYRFTSYWIGWVRQMPGKGLEWMGIIYPGDSDTKYSPSF
QGQVTISAGKSISTAYLQWSSLKASDTAMYYCARHGRGYDAYDGAFDIWGQGTMVTVSSASTKG
PSVFPLAPSSKSTSGGTAALGCLVKDYFPEPVTVSWNSGALTSGVHTFPAVLQSSGLYSLSSVV
TVPSSSLGTQTYICNVNHKPSNTKVDKKVEPKSCDKTHTCPPCPAPEAAGGPSVFLFPPKPKDT
LMISRTPEVTCVVVAVSHEDPEVKFNWYVDGVEVHNAKTKPREEQYNSTYRVVSVLTVLHQDWL
NGKEYKCKVSNKALPAPIEKTISKAKGQPREPQVYTLPPSRDELTKNQVSLTCLVKGFYPSDIA
VEWESNGQPENNYKTTPPVLDSDGSFFLYSKLTVDKSRWQQGNVFSCSVMHEALHNHYTQKSLS
LSPGK
ABTx308 light chain (LC):
(SEQ ID NO: 1019)
AIQLTQSPSSLSASVGDRVTITCRASQGISSALAWYQQKPGKAPKLLIYDASSLESGVPSRFSG
SGSGTDFTLTISSLQPEDFATYYCQQFSSYPLTFGGGTKVEIKRTVAAPSVFIFPPSDEQLKSG
TASVVCLLNNFYPREAKVQWKVDNALQSGNSQESVTEQDSKDSTYSLSSTLTLSKADYEKHKVY
ACEVTHQGLSSPVTKSFNRGEC

[0292] The three CDRs of the ABTx308 VH region are as follows:

```
  (SEQ ID NO: 421)
VH CDR-1: GYRFTSYW
  (SEQ ID NO: 1063)
VH CDR-2: IYPGDSDTK
(SEQ ID NO: 1032)
VH CDR-3: ARHGRGYDAYDGAFDI
```

[0293] The three CDRs of the ABTx308 VL region are as follows:

(SEQ ID NO: 424)
VL CDR-1: QGISSA
VL CDR-2: DAS
(SEQ ID NO: 1020)
VL CDR-3: QQFSSYPLT

[0294] The four framework (FR) regions, i.e., FR1, FR2, FR3, and FR4, of the ABTx308 antibody are located on either side of each of the CDRs in VH and VL region sequences shown supra. In particular, the four FRs of the ABTx308 antibody VH region are as follows:

(SEQ ID NO: 426)
VH FRI: QVQLVQSGAAVKKPGESLKISCKGS
(SEQ ID NO: 427)
VH FR2: IGWVRQMPGKGLEWMGI
(SEQ ID NO: 1059)
VH FR3: YSPSFQGQVTISAGKSISTAYLQWSSLKASDTAMYYC
(SEQ ID NO: 429)
VH FR4: WGQGTMVTVSS

[0295] The four FRs of the ABTx308 antibody VL region are as follows:

```
  (SEQ ID NO: 1060)
VL FR1: AIQLTQSPSSLSASVGDRVTITCRAS
  (SEQ ID NO: 1061)
VL FR2: LAWYQQKPGKAPKLLIY
  (SEQ ID NO: 1062)
VL FR3: SLESGVPSRFSGSGSGTDFTLTISSLQPEDFATYYC
(SEQ ID NO: 433)
VL FR4: FGGGTKVEIKRTV
```

[0296] By “ABTx308 polynucleotide” is meant a nucleic acid molecule (e.g., DNA) encoding at least a fragment of an ABTx308 antibody. In an embodiment, the encoded fragment has antigen binding activity.

[0297] By “ABTx309” is meant an antibody having at least about 85% amino acid sequence identity to an antibody sequence of antibody ABTx309 or comprising VH and/or VL CDRs 1-3 of ABTx309 or antigen binding fragments thereof, wherein each of the antibody, CDRs, and antigen binding fragments specifically bind to a wild type CD117 polypeptide but fail to detectably bind or have only reduced binding to an altered CD117 polypeptide. In embodiments, the antibody or antigen binding fragment thereof has at least 90%, 93%, 95%, 98%, 99% or 100% amino acid sequence identity to an antibody sequence of antibody ABTx309. Exemplary heavy chain and light chain sequences for antibody ABTx309 are provided below, where the variable regions are in plain text, the constant domains are in bold, and complementarity determining regions (CDRs), i.e., CDR1, CDR2, and CDR2, are underlined:

ABTx309 heavy chain (HC):
(SEQ ID NO: 1067)
QVQLVQSGAAVKKPGESLKISCKGSGYRFTSYWIGWVRQMPGKGLEWMGIIYPGDSDTRYSPSF
QGQVTISAGKSISTAYLQWSSLKASDTAMYYCARHGRGYDAYDGAFDIWGQGTMVTVSSASTKG
PSVFPLAPSSKSTSGGTAALGCLVKDYFPEPVTVSWNSGALTSGVHTFPAVLQSSGLYSLSSVV
TVPSSSLGTQTYICNVNHKPSNTKVDKKVEPKSCDKTHTCPPCPAPEAAGGPSVFLFPPKPKDT
LMISRTPEVTCVVVAVSHEDPEVKFNWYVDGVEVHNAKTKPREEQYNSTYRVVSVLTVLHQDWL
NGKEYKCKVSNKALPAPIEKTISKAKGQPREPQVYTLPPSRDELTKNQVSLTCLVKGFYPSDIA
VEWESNGQPENNYKTTPPVLDSDGSFFLYSKLTVDKSRWQQGNVFSCSVMHEALHNHYTQKSLS
LSPGK
ABTx309 light chain (LC):
(SEQ ID NO: 1031)
AIQLTQSPSSLSASVGDRVTITCRASQGISSALAWYQQKPGKAPKLLIYDASSLESGVPSRFSG
SGSGTDFTLTISSLQPEDFATYYCQQTNSYPLTFGGGTKVEIKRTVAAPSVFIFPPSDEQLKSG
TASVVCLLNNFYPREAKVQWKVDNALQSGNSQESVTEQDSKDSTYSLSSTLTLSKADYEKHKVY
ACEVTHQGLSSPVTKSFNRGEC

[0298] The three CDRs of the ABTx309 VH region are as follows:

VH CDR-1:
(SEQ ID NO: 421)
GYRFTSYW
VH CDR-2:
(SEQ ID NO: 1053)
IYPGDSDTR
VH CDR-3:
(SEQ ID NO: 1064)
ARHGRGYDAYDGAFDI

[0299] The three CDRs of the ABTx309 VL region are as follows:

VL CDR-1:
(SEQ ID NO: 424)
QGISSA
VL CDR-2:
DAS
VL CDR-3:
(SEQ ID NO: 1044)
QQTNSYPLT

[0300] The four framework (FR) regions, i.e., FR1, FR2, FR3, and FR4, of the ABTx309 antibody are located on either side of each of the CDRs in VH and VL region sequences shown supra. In particular, the four FRs of the ABTx309 antibody VH region are as follows:

VH FR1:
(SEQ ID NO: 1057)
QVQLVQSGAAVKKPGESLKISCKGS
VH FR2:
(SEQ ID NO: 1058)
IGWVRQMPGKGLEWMGI
VH FR3:
(SEQ ID NO: 1059)
YSPSFQGQVTISAGKSISTAYLQWSSLKASDTAMYYC
VH FR4:
(SEQ ID NO: 429)
WGQGTMVTVSS

[0301] The four FRs of the ABTx309 antibody VL region are as follows:

VL FR1:
(SEQ ID NO: 430)
AIQLTQSPSSLSASVGDRVTITCRAS
VL FR2:
(SEQ ID NO: 431)
LAWYQQKPGKAPKLLIY
VL FR3:
(SEQ ID NO: 432)
SLESGVPSRFSGSGSGTDFTLTISSLQPEDFATYYC
VL FR4:
(SEQ ID NO: 433)
FGGGTKVEIKRTV

[0302] By “ABTx309 polynucleotide” is meant a nucleic acid molecule (e.g., DNA) encoding at least a fragment of an ABTx309 antibody. In an embodiment, the encoded fragment has antigen binding activity.

[0303] By “ABTx196” is meant an antibody having at least about 85% amino acid sequence identity to an antibody sequence of antibody ABTx196 or comprising VH and/or VL CDRs 1-3 of ABTx196 or antigen binding fragments thereof, wherein each of the antibody, CDRs, and antigen binding fragments specifically bind to a wild type CD117 polypeptide but fail to detectably bind or have only reduced binding to an altered CD117 polypeptide. In embodiments, the antibody or antigen binding fragment thereof has at least 90%, 93%, 95%, 98%, 99% or 100% amino acid sequence identity to an antibody sequence of antibody ABTx196. Exemplary heavy chain variable region and light chain variable region sequences for antibody ABTx196 are provided below, where complementarity determining regions (CDRs), i.e., CDR1, CDR2, and CDR2, are underlined:

ABTx196 heavy chain variable region (VH):
(SEQ ID NO: 1120)
EVQLVESGGGLVQPGRSLRLSCAASGFTFDDYAMHWVRQAPGKGLEWVS
GISWNSGTIGYADSVKGRFTNSRDNAKNSLYLEMNSLRAEDTALYYCAK
DSPPGYCSSASCYGAFDIWGQGTMVTVSS
ABTx196 light chain variable region (VL):
(SEQ ID NO: 1068)
DVVMTQSPGTLSLSPGERATLSCRASQSVSSSYLAWYQQKPGQAPRLLI
YGASSRATGIPDRFSGSGSGTDFTLTISRLEPEDFAVYYCQQSETCLTF
GGGTKLEIK

[0304] The three CDRs of the ABTx196 VH region are as follows:

VH CDR-1:
(SEQ ID NO: 391)
GFTFDDYA
VH CDR-2:
(SEQ ID NO: 1070)
ISWNSGTIG
VH CDR-3:
(SEQ ID NO: 393)
AKDSPPGYCSSASCYGAFDI
The three CDRs of the ABTx196 VL region are as
follows:
VL CDR-1:
(SEQ ID NO: 394)
QSVSSSY
VL CDR-2:
GAS
VL CDR-3:
(SEQ ID NO: 1074)
QQSETCLT

[0305] The four framework (FR) regions, i.e., FR1, FR2, FR3, and FR4, of the ABTx196 antibody are located on either side of each of the CDRs in VH and VL region sequences shown supra. In particular, the four FRs of the ABT x196 antibody VH region are as follows:

VH FR1:
(SEQ ID NO: 396)
[sequence omitted]
VH FR2:
(SEQ ID NO: 397)
MHWVRQAPGKGLEWVSG
VH FR3:
(SEQ ID NO: 1077)
YADSVKGRFTNSRDNAKNSLYLEMNSLRAEDTALYYC
VH FR4:
(SEQ ID NO: 429)
WGQGTMVTVSS

[0306] The four FRs of the ABT x196 antibody VL region are as follows:

VL FR1:
(SEQ ID NO: 400)
DVVMTQSPGTLSLSPGERATLSCRAS
VL FR2:
(SEQ ID NO: 446)
LAWYQQKPGQAPRLLIY
VL FR3:
(SEQ ID NO: 402)
[sequence omitted]
VL FR4:
(SEQ ID NO: 1082)
FGGGTKLEIK

[0307] By “ABT x196 polynucleotide” is meant a nucleic acid molecule (e.g., DNA) encoding at least a fragment of an ABT x196 antibody. In an embodiment, the encoded fragment has antigen binding activity.

[0308] By “ABTx202” is meant an antibody having at least about 85% amino acid sequence identity to an antibody sequence of antibody ABTx202 or comprising VH and/or VL CDRs 1-3 of ABTx202 or antigen binding fragments thereof, wherein each of the antibody, CDRs, and antigen binding fragments specifically bind to a wild type CD117 polypeptide but fail to detectably bind or have only reduced binding to an altered CD117 polypeptide. In embodiments, the antibody or antigen binding fragment thereof has at least 90%, 93%, 95%, 98%, 99% or 100% amino acid sequence identity to an antibody sequence of antibody ABTx202. Exemplary heavy chain variable region and light chain variable region sequences for antibody ABTx202 are provided below, where complementarity determining regions (CDRs), i.e., CDR1, CDR2, and

[0309] CDR2, are underlined:

ABTx202 Heavy chain variable region (VH):
(SEQ ID NO: 1085)
EVQLVESGGGLVQPGRSLRLSCAASGFTFDDYAMHWVRQAPGKGLEWVS
GISWNSGTIGYADSVKGRFTSSRDNAKNSLYLEMNSLRAEDTALYYCAK
DSPPGYCSSASCYGAFDIWGQGTMVTVSS
ABTx202 light chain variable region (VL):
(SEQ ID NO: 1086)
EIVMTQSPGTLSLSPGERATLSCRASQSVSSSYLAWYQQKPGQAPRLLI
YGSSTRATGIPARFSGSGSGTEFALTISSLQSEDFAVYYCQQYNFWPYT
FGQGTKVEIK

[0310] The three CDRs of the ABTx202 VH region are as follows:

VH CDR-1:
(SEQ ID NO: 391)
GFTFDDYA
VH CDR-2:
(SEQ ID NO: 1070)
ISWNSGTIG
VH CDR-3:
(SEQ ID NO: 393)
AKDSPPGYCSSASCYGAFDI

[0311] The three CDRs of the ABTx202 Light chain variable region (VL) region are as follows:

VL CDR-1:
(SEQ ID NO: 394)
QSVSSSY
VL CDR-2:
GSS
VL CDR-3:
(SEQ ID NO: 1084)
QQYNFWPYT

[0312] The four framework (FR) regions, i.e., FR1, FR2, FR3, and FR4, of the ABTx202 antibody are located on either side of each of the CDRs in VH and VL region sequences shown supra. In particular, the four FRs of the ABTx202 antibody VH region are as follows:

VH FR1:
(SEQ ID NO: 396)
[sequence omitted]
VH FR2:
(SEQ ID NO: 397)
MHWVRQAPGKGLEWVSG
VH FR3:
(SEQ ID NO: 1065)
YADSVKGRFTSSRDNAKNSLYLEMNSLRAEDTALYYC
VH FR4:
(SEQ ID NO: 429)
WGQGTMVTVSS

[0313] The four FRs of the ABTx202 antibody VL region are as follows:

VL FR1:
(SEQ ID NO: 1087)
EIVMTQSPGTLSLSPGERATLSCRAS
VL FR2:
(SEQ ID NO: 446)
LAWYQQKPGQAPRLLIY
VL FR3:
(SEQ ID NO: 1080)
TRATGIPARFSGSGSGTEFALTISSLQSEDFAVYYC
VL FR4:
(SEQ ID NO: 1088)
FGQGTKVEIK

[0314] By “ABTx202 polynucleotide” is meant a nucleic acid molecule (e.g., DNA) encoding at least a fragment of an ABTx202 antibody. In an embodiment, the encoded fragment has antigen binding activity.

[0315] By “ABTx198” is meant an antibody having at least about 85% amino acid sequence identity to an antibody sequence of antibody ABTx198 or comprising VH and/or VL CDRs 1-3 of ABTx198 or antigen binding fragments thereof, wherein each of the antibody, CDRs, and antigen binding fragments specifically bind to a wild type CD117 polypeptide but fail to detectably bind or have only reduced binding to an altered CD117 polypeptide. In embodiments, the antibody or antigen binding fragment thereof has at least 90%, 93%, 95%, 98%, 99% or 100% amino acid sequence identity to an antibody sequence of antibody ABTx198. Exemplary heavy chain variable region and light chain variable region sequences for antibody ABTx198 are provided below, where complementarity determining regions (CDRs), i.e., CDR1, CDR2, and CDR2, are underlined:

ABTx198 heavy chain variable region (VH):
(SEQ ID NO: 1089)
EVQLVESGGGLVQPGRSLRLSCAASGFTFDDYAMHWVRQAPGKGL
EWVSGISWNSGTIGYADSVKGRFTNSRDNAKNSLYLEMNSLRAED
TALYYCAKDSPPGYCASASCYGAFDIWGQGTMVTVSS
ABTx198 light chain variable region (VL):
(SEQ ID NO: 1103)
DVVMTQSPGTLSLSPGERATLSCRASQSVSSSYLAWYQQKPGQAP
RLLIYGASSRATGIPDRFSGSGSGTDFTLTISRLEPEDFAVYYCQ
QDSLGLTFGGGTKLEIK

[0316] The three CDRs of the ABTx198 VH region are as follows:

VH CDR-1:
(SEQ ID NO: 391)
GFTFDDYA
VH CDR-2:
(SEQ ID NO: 1070)
ISWNSGTIG
VH CDR-3:
(SEQ ID NO: 1090)
AKDSPPGYCASASCYGAFDI

[0317] The three CDRs of the ABTx198 Light chain variable region (VL) region are as follows:

VL CDR-1:
(SEQ ID NO: 394)
QSVSSSY
VL CDR-2:
GAS
VL CDR-3:
(SEQ ID NO: 1091)
QQDSLGLT

[0318] The four framework (FR) regions, i.e., FR1, FR2, FR3, and FR4, of the ABTx198 antibody are located on either side of each of the CDRs in VH and VL region sequences shown supra. In particular, the four FRs of the ABTx198 antibody VH region are as follows:

VH FR1:
(SEQ ID NO: 396)
[sequence omitted]
VH FR2:
(SEQ ID NO: 397)
MHWVRQAPGKGLEWVSG
VH FR3:
(SEQ ID NO: 1077)
YADSVKGRFTNSRDNAKNSLYLEMNSLRAEDTALYYC
VH FR4:
(SEQ ID NO: 429)
WGQGTMVTVSS

[0319] The four FRs of the ABTx198 antibody VL region are as follows:

VL FR1:
(SEQ ID NO: 400)
DVVMTQSPGTLSLSPGERATLSCRAS
VL FR2:
(SEQ ID NO: 446)
LAWYQQKPGQAPRLLIY
VL FR3:
(SEQ ID NO: 402)
[sequence omitted]
VL FR4:
(SEQ ID NO: 1082)
FGGGTKLEIK

[0320] By “ABTx198 polynucleotide” is meant a nucleic acid molecule (e.g., DNA) encoding at least a fragment of an ABTx198 antibody. In an embodiment, the encoded fragment has antigen binding activity.

[0321] By “ABTx203” is meant an antibody having at least about 85% amino acid sequence identity to an antibody sequence of antibody ABTx203 or comprising VH and/or VL CDRs 1-3 of ABTx203 or antigen binding fragments thereof, wherein each of the antibody, CDRs, and antigen binding fragments specifically bind to a wild type CD117 polypeptide but fail to detectably bind or have only reduced binding to an altered CD117 polypeptide. In embodiments, the antibody or antigen binding fragment thereof has at least 90%, 93%, 95%, 98%, 99% or 100% amino acid sequence identity to an antibody sequence of antibody ABTx203. Exemplary heavy chain variable region and light chain variable region sequences for antibody ABTx203 are provided below, where complementarity determining regions (CDRs), i.e., CDR1, CDR2, and CDR2, are underlined:

ABTx203 heavy chain variable region (VH):
(SEQ ID NO: 1092)
EVQLVESGGGLVQPGRSLRLSCAASGFTFDDYAMHWVRQAP
GKGLEWVSGISWNSGTIGYADSVKGRFTNSRDNAKNSLYLE
MNSLRAEDTALYYCAKDWPSGFCSSAYCYGAFDIWGQGTMV
TVSS
ABTx203 light chain variable region (VL):
(SEQ ID NO: 1093)
DIVMTQSPSFLSASVGDRVTITCRASQGISSYLAWYQQKP
GKAPKLLIYAASTLQNGVPSRFSGSGSGTDFTLTITSLQP
EDFATYYCQQSYSTPYTFGQGTKLEIK

[0322] The three CDRs of the ABTx203 VH region are as follows:

VH CDR-1:
(SEQ ID NO: 391)
GFTFDDYA
VH CDR-2:
(SEQ ID NO: 1070)
ISWNSGTIG
VH CDR-3:
(SEQ ID NO: 1094)
AKDWPSGFCSSAYCYGAFDI

[0323] The three CDRs of the ABTx203 VL region are as follows:

VL CDR-1:
(SEQ ID NO: 469)
QGISSY
VL CDR-2:
AAS
VL CDR-3:
(SEQ ID NO: 1097)
QQSYSTPYT

[0324] The four framework (FR) regions, i.e., FR1, FR2, FR3, and FR4, of the ABTx203 antibody are located on either side of each of the CDRs in VH and VL region sequences shown supra. In particular, the four FRs of the ABTx203 antibody VH region are as follows:

VH FR1:
(SEQ ID NO: 396)
[sequence omitted]
VH FR2:
(SEQ ID NO: 397)
MHWVRQAPGKGLEWVSG
VH FR3:
(SEQ ID NO: 1077)
YADSVKGRFTNSRDNAKNSLYLEMNSLRAEDTALYYC
VH FR4:
(SEQ ID NO: 429)
WGQGTMVTVSS

[0325] The four FRs of the ABTx203 antibody VL region are as follows:

VL FR1:
(SEQ ID NO: 475)
DIVMTQSPSFLSASVGDRVTITCRAS
VL FR2:
(SEQ ID NO: 431)
LAWYQQKPGKAPKLLIY
VL FR3:
(SEQ ID NO: 1099)
TLQNGVPSRFSGSGSGTDFTLTITSLOPEDFATYYC
VL FR4:
(SEQ ID NO: 1100)
FGQGTKLEIK

[0326] By “ABTx203 polynucleotide” is meant a nucleic acid molecule (e.g., DNA) encoding at least a fragment of an ABTx203 antibody. In an embodiment, the encoded fragment has antigen binding activity.

[0327] By “ABTx205” is meant an antibody having at least about 85% amino acid sequence identity to an antibody sequence of antibody ABTx205 or comprising VH and/or VL CDRs 1-3 of ABTx205 or antigen binding fragments thereof, wherein each of the antibody, CDRs, and antigen binding fragments specifically bind to a wild type CD117 polypeptide but fail to detectably bind or have only reduced binding to an altered CD117 polypeptide. In embodiments, the antibody or antigen binding fragment thereof has at least 90%, 93%, 95%, 98%, 99% or 100% amino acid sequence identity to an antibody sequence of antibody ABTx205. Exemplary heavy chain variable region and light chain variable region sequences for antibody ABTx205 are provided below, where complementarity determining regions (CDRs), i.e., CDR1, CDR2, and CDR2, are underlined:

ABTx205 heavy chain variable region (VH):
(SEQ ID NO: 1120)
EVQLVESGGGLVQPGRSLRLSCAASGFTFDDYAMHWVRQAPGKGL
EWVSGISWNSGTIGYADSVKGRFTNSRDNAKNSLYLEMNSLRAED
TALYYCAKDSPPGYCSSASCYGAFDIWGQGTMVTVSS
ABTx205 light chain variable region (VL):
(SEQ ID NO: 1093)
DIVMTQSPSFLSASVGDRVTITCRASQGISSYLAWYQQKPGKAPK
LLIYAASTLQNGVPSRFSGSGSGTDFTLTITSLQPEDFATYYCQQ
SYSTPYTFGQGTKLEIK

[0328] The three CDRs of the ABTx205 VH region are as follows:

VH CDR-1:
(SEQ ID NO: 391)
GFTFDDYA
VH CDR-2:
(SEQ ID NO: 1070)
ISWNSGTIG
VH CDR-3:
(SEQ ID NO: 393)
AKDSPPGYCSSASCYGAFDI

[0329] The three CDRs of the ABTx205 VL region are as follows:

VL CDR-1:
(SEQ ID NO: 1095)
QGISSY
VL CDR-2:
AAS
VL CDR-3:
(SEQ ID NO: 1097)
QQSYSTPYT

[0330] The four framework (FR) regions, i.e., FR1, FR2, FR3, and FR4, of the ABTx205 antibody are located on either side of each of the CDRs in VH and VL region sequences shown supra. In particular, the four FRs of the ABTx205 antibody VH region are as follows:

VH FR1:
(SEQ ID NO: 396)
[sequence omitted]
VH FR2:
(SEQ ID NO: 397)
MHWVRQAPGKGLEWVSG
VH FR3:
(SEQ ID NO: 1077)
YADSVKGRFTNSRDNAKNSLYLEMNSLRAEDTALYYC
VH FR4:
(SEQ ID NO: 429)
WGQGTMVTVSS

[0331] The four FRs of the ABTx205 antibody VL region are as follows:

VL FR1:
(SEQ ID NO: 475)
DIVMTQSPSFLSASVGDRVTITCRAS
VL FR2:
(SEQ ID NO: 431)
LAWYQQKPGKAPKLLIY
VL FR3:
(SEQ ID NO: 1099)
TLQNGVPSRFSGSGSGTDFTLTITSLQPEDFATYYC
VL FR4:
(SEQ ID NO: 1100)
FGQGTKLEIK

[0332] By “ABTx205 polynucleotide” is meant a nucleic acid molecule (e.g., DNA) encoding at least a fragment of an ABTx205 antibody. In an embodiment, the encoded fragment has antigen binding activity.

[0333] By “ABTx206” is meant an antibody having at least about 85% amino acid sequence identity to an antibody sequence of antibody ABTx206 or comprising VH and/or VL CDRs 1-3 of ABTx206 or antigen binding fragments thereof, wherein each of the antibody, CDRs, and antigen binding fragments specifically bind to a wild type CD117 polypeptide but fail to detectably bind or have only reduced binding to an altered CD117 polypeptide. In embodiments, the antibody or antigen binding fragment thereof has at least 90%, 93%, 95%, 98%, 99% or 100% amino acid sequence identity to an antibody sequence of antibody ABTx206. Exemplary heavy chain variable region and light chain variable region sequences for antibody ABTx206 are provided below, where the variable regions are in plain text, the constant domains are in bold, and complementarity determining regions (CDRs), i.e., CDR1, CDR2, and CDR2, are underlined:

ABTx206 heavy chain variable region (VH):
(SEQ ID NO: 1101)
EVQLVESGGGLVQPGRSLRLSCAASGFTFDDYAMHWVRQA
PGKGLEWVSGISWNSGTIGYADSVKGRFTNSRDNAKNSLY
LEMNSLRAEDTALYYCAKDSPPGYCSSASCYGAFDIRGQG
TMVTVSS
ABTx206 light chain variable region (VL):
(SEQ ID NO: 1093)
DIVMTQSPSFLSASVGDRVTITCRASQGISSYLAWYQQK
PGKAPKLLIYAASTLQNGVPSRFSGSGSGTDFTLTITSL
QPEDFATYYCQQSYSTPYTFGQGTKLEIK

[0334] The three CDRs of the ABTx206 VH region are as follows:

VH CDR-1:
(SEQ ID NO: 391)
GFTFDDYA
VH CDR-2:
(SEQ ID NO: 1070)
ISWNSGTIG
VH CDR-3:
(SEQ ID NO: 393)
AKDSPPGYCSSASCYGAFDI

[0335] The three CDRs of the ABTx206 VL region are as follows:

VL CDR-1:
(SEQ ID NO: 1095)
QGISSY
VL CDR-2:
AAS
VL CDR-3:
(SEQ ID NO: 1097)
QQSYSTPYT

[0336] The four framework (FR) regions, i.e., FR1, FR2, FR3, and FR4, of the ABTx206 antibody are located on either side of each of the CDRs in VH and VL region sequences shown supra. In particular, the four FRs of the ABTx206 antibody VH region are as follows:

VH FR1:
(SEQ ID NO: 396)
[sequence omitted]
VH FR2:
(SEQ ID NO: 397)
MHWVRQAPGKGLEWVSG
VH FR3:
(SEQ ID NO: 1077)
YADSVKGRFTNSRDNAKNSLYLEMNSLRAEDTALYYC
VH FR4:
(SEQ ID NO: 1102)
RGQGTMVTVSS

[0337] The four FRs of the ABTx206 antibody VL region are as follows:

VL FR1:
(SEQ ID NO: 475)
DIVMTQSPSFLSASVGDRVTITCRAS
VL FR2:
(SEQ ID NO: 431)
LAWYQQKPGKAPKLLIY
VL FR3:
(SEQ ID NO: 1099)
TLQNGVPSRFSGSGSGTDFTLTITSLQPEDFATYYC
VL FR4:
(SEQ ID NO: 1100)
FGQGTKLEIK

[0338] By “ABTx206 polynucleotide” is meant a nucleic acid molecule (e.g., DNA) encoding at least a fragment of an ABTx206 antibody. In an embodiment, the encoded fragment has antigen binding activity.

[0339] By “adenine” or “9H-Purin-6-amine” is meant a purine nucleobase with the molecular formula C₅H₅N₅, having the structure

[chemical structure]

and corresponding to CAS No. 73-24-5.

[0340] By “adenosine” or “4-Amino-1-[(2R,3R,4S,5R)-3,4-dihydroxy-5-(hydroxymethyl)oxolan-2-yl]pyrimidin-2 (1H)-one” is meant an adenine molecule attached to a ribose sugar via a glycosidic bond, having the structure

[chemical structure]

and corresponding to CAS No. 65-46-3. Its molecular formula is C₁₀H₁₃N₅O₄.

[0341] By “adenosine deaminase” or “adenine deaminase” is meant a polypeptide or fragment thereof capable of catalyzing the hydrolytic deamination of adenine or adenosine. In some embodiments, the deaminase or deaminase domain is an adenosine deaminase catalyzing the hydrolytic deamination of adenosine to inosine or deoxy adenosine to deoxyinosine. In some embodiments, the adenosine deaminase catalyzes the hydrolytic deamination of adenine or adenosine in deoxyribonucleic acid (DNA). The adenosine deaminases (e.g., engineered adenosine deaminases, evolved adenosine deaminases) provided herein may be from any organism (e.g., eukaryotic, prokaryotic), including but not limited to algae, bacteria, fungi, plants, invertebrates (e.g., insects), and vertebrates (e.g., amphibians, mammals). In some embodiments, the adenosine deaminase is an adenosine deaminase variant with one or more alterations and is capable of deaminating both adenine and cytosine in a target polynucleotide (e.g., DNA, RNA) and may be referred to as a “dual deaminase”. Non-limiting examples of dual deaminases include those described in PCT/US22/22050. In some embodiments, the target polynucleotide is single or double stranded. In some embodiments, the adenosine deaminase variant is capable of deaminating both adenine and cytosine in DNA. In some embodiments, the adenosine deaminase variant is capable of deaminating both adenine and cytosine in single-stranded DNA. In some embodiments, the adenosine deaminase variant is capable of deaminating both adenine and cytosine in RNA. In embodiments, the adenosine deaminase variant is selected from those described in PCT/US2020/018192, PCT/US2020/049975, PCT/US2017/045381, and PCT/US2020/028568, the full contents of which are each incorporated herein by reference in their entireties for all purposes.

[0342] By “adenosine deaminase activity” is meant catalyzing the deamination of adenine or adenosine to guanine in a polynucleotide. In some embodiments, an adenosine deaminase variant as provided herein maintains adenosine deaminase activity (e.g., at least about 30%, 40%, 50%, 60%, 70%, 80%, 90% or more of the activity of a reference adenosine deaminase (e.g., TadA*8.20 or TadA*8.19)).

[0343] By “Adenosine Base Editor (ABE)” is meant a base editor comprising an adenosine deaminase.

[0344] By “Adenosine Base Editor (ABE)” is meant a base editor comprising an adenosine deaminase.

[0345] By “Adenosine Base Editor (ABE) polynucleotide” is meant a polynucleotide encoding an ABE. By “Adenosine Base Editor 8 (ABE8) polypeptide” or “ABE8” is meant a base editor as defined herein comprising an adenosine deaminase or adenosine deaminase variant comprising one or more of the alterations listed in Table 5B, one of the combinations of alterations listed in Table 5B, or an alteration at one or more of the amino acid positions listed in Table 5B, such alterations are relative to the following reference sequence: MSEVEFSHEYWMRHALTLAKRARDEREVPVGAVLVLNNRVIGEGWNRAIGLHDPTAHAEIMALR QGGLVMQNYRLIDATLYVTFEPCVMCAGAMIHSRIGRVVFGVRNAKTGAAGSLMDVLHYPGMNH RVEITEGILADECAALLCYFFRMPRQVFNAQKKAQSSTD (SEQ ID NO: 1), or a corresponding position in another adenosine deaminase. In embodiments, ABE8 comprises alterations at amino acids 82 and/or 166 of SEQ ID NO: 1 In some embodiments, ABE8 comprises further alterations, as described herein, relative to the reference sequence.

[0346] By “Adenosine Base Editor 8 (ABE8) polynucleotide” is meant a polynucleotide encoding an ABE8 polypeptide.

[0347] By “Adenosine Base Editor 8 (ABE8) polynucleotide” is meant a polynucleotide encoding an ABE8 polypeptide.

[0348] “Administering” is referred to herein as providing one or more compositions described herein to a patient or a subject. By way of example and without limitation, composition administration, e.g., injection, can be performed by intravenous (i.v.) injection, sub-cutaneous (s.c.) injection, intradermal (i.d.) injection, intraperitoneal (i.p.) injection, or intramuscular (i.m.) injection. One or more such routes can be employed. Parenteral administration can be, for example, by bolus injection or by gradual perfusion over time. In some embodiments, parenteral administration includes infusing or injecting intravascularly, intravenously, intramuscularly, intraarterially, intrathecally, intratumorally, intradermally, intraperitoneally, transtracheally, subcutaneously, subcuticularly, intraarticularly, subcapsularly, subarachnoidly and intrasternally. Alternatively, or concurrently, administration can be by an oral route.

[0349] By “agent” is meant any small molecule chemical compound, antibody, nucleic acid molecule, or polypeptide, or fragments thereof.

[0350] “Allogeneic,” as used herein, refers to cells of the same species that differ genetically to the cell in comparison.

[0351] “Autologous,” as used herein, refers to cells from the same subject.

[0352] By “alteration” is meant a change in the level, structure, or activity of an analyte, gene or polypeptide as detected by standard art known methods such as those described herein. As used herein, an alteration includes a change (e.g., increase or decrease) in expression levels. In embodiments, the increase or decrease in expression levels is by 10%, 25%, 40%, 50% or greater. In some embodiments, an alteration includes an insertion, deletion, or substitution of a nucleobase or amino acid (by, e.g., genetic engineering).

[0353] By “ameliorate” is meant decrease, suppress, attenuate, diminish, arrest, or stabilize the development or progression of a disease.

[0354] By “analog” is meant a molecule that is not identical but has analogous functional or structural features. For example, a polypeptide analog retains the biological activity of a corresponding naturally occurring polypeptide, while having certain biochemical modifications that enhance the analog's function relative to a naturally occurring polypeptide. Such biochemical modifications could increase the analog's protease resistance, membrane permeability, or half-life, without altering, for example, ligand binding. An analog may include an unnatural amino acid.

[0355] As used herein, the term “antibody” refers to an immunoglobulin molecule that specifically binds to, or is immunologically reactive with, a particular antigen, and includes polyclonal, monoclonal, genetically engineered, and otherwise modified forms of antibodies, including but not limited to chimeric antibodies, humanized antibodies, heteroconjugate antibodies (e.g., bi-tri- and quad-specific antibodies, diabodies, triabodies, and tetrabodies), and antigen binding fragments of antibodies, including, for example, Fab′, F(ab′)2, Fab, Fv, rlgG, and scFv fragments. Unless otherwise indicated, the term “monoclonal antibody” (mAb) is meant to include both intact molecules, as well as antibody fragments (including, for example, Fab and F(ab′)2 fragments) that are capable of specifically binding to a target protein. As used herein, the Fab and F(ab′)2 fragments refer to antibody fragments that lack the Fc fragment of an intact antibody.

[0356] Antibodies (immunoglobulins) comprise two heavy chains linked together by disulfide bonds, and two light chains, with each light chain being linked to a respective heavy chain by disulfide bonds in a “Y” shaped configuration. Each heavy chain has at one end a variable domain (VH) followed by a number of constant domains (CH). Each light chain has a variable domain (VL) at one end and a constant domain (CL) at its other end. The variable domain of the light chain (VL) is aligned with the variable domain of the heavy chain (VL), and the light chain constant domain (CL) is aligned with the first constant domain of the heavy chain (CH1). The variable regions of each pair of light and heavy chains form the antigen binding site. The isotype of the heavy chain (gamma, alpha, delta, epsilon or mu) determines the immunoglobulin class (IgG, IgA, IgD, IgE or IgM, respectively). The light chain is either of two isotypes (kappa (κ) or lambda (λ)) found in all antibody classes. The terms “antibody” or “antibodies” include intact antibodies, such as polyclonal antibodies or monoclonal antibodies (mAbs), as well as proteolytic portions or fragments thereof, such as the Fab or F(ab′)2 fragments, that are capable of specifically binding to a target protein. Antibodies may include chimeric antibodies; recombinant and engineered antibodies, and antigen binding fragments thereof. Exemplary functional antibody fragments comprising whole or essentially whole variable regions of both the light and heavy chains are defined as follows: (i) Fv, defined as a genetically engineered fragment consisting of the variable region of the light chain and the variable region of the heavy chain expressed as two chains; (ii) single-chain Fv (“scFv”), a genetically engineered single-chain molecule including the variable region of the light chain and the variable region of the heavy chain, linked by a suitable polypeptide linker; (iii) Fab, a fragment of an antibody molecule containing a monovalent antigen-binding portion of an antibody molecule, obtained by treating an intact antibody with the enzyme papain to yield the intact light chain and the Fd fragment of the heavy chain, which consists of the variable and CH1 domains thereof; (iv) Fab′, a fragment of an antibody molecule containing a monovalent antigen-binding portion of an antibody molecule, obtained by treating an intact antibody with the enzyme pepsin, followed by reduction (two Fab′ fragments are generated per antibody molecule); and (v) F(ab′)2, a fragment of an antibody molecule containing a monovalent antigen-binding portion of an antibody molecule, obtained by treating an intact antibody with the enzyme pepsin (i.e., a dimer of Fab′ fragments held together by two disulfide bonds).

[0357] The term “antigen-binding fragment,” as used herein, refers to one or more portions or fragments of an antibody that retain the ability to specifically bind to a target antigen. In an embodiment, the target antigen is a CD117 variant polypeptide or peptide. The antigen-binding function of an antibody can be performed by fragments of a full-length antibody. The antibody fragments can be a Fab, F(ab′)2, scFv, SMIP, diabody, a triabody, an affibody, a nanobody, an aptamer, or a domain antibody. Examples of binding fragments encompassed by the term “antigen-binding fragment” of an antibody include, but are not limited to: (i) a Fab fragment, a monovalent fragment consisting of the V_{L}, V_{H}, C_{L}, and C_{H1} domains; (ii) a F(ab′)2 fragment, a bivalent fragment comprising two Fab fragments linked by a disulfide bridge at the hinge region; (iii) a Fd fragment consisting of the V_{H} and C_{H1} domains; (iv) a Fv fragment consisting of the V_{L} and V_{H} domains of a single arm of an antibody, (v) a dAb including V_{H} and V_{L} domains; (vi) a dAb fragment (Ward et al., Nature 341:544-546, 1989), which consists of a V_{H} domain; (vii) a dAb which consists of a V_{H} or a V_{L} domain; (viii) an isolated complementarity determining region (CDR); and (ix) a combination of two or more isolated CDRs which may optionally be joined by a synthetic linker. Furthermore, although the two domains of the Fv fragment, V_{L} and V_{H}, are coded for by separate genes, they can be joined, using recombinant methods, by a linker that enables them to be made as a single protein chain in which the V_{L} and V_{H} regions pair to form monovalent molecules (known as single-chain Fv (scFv); see, e.g., Bird et al., Science 242:423-426, 1988, and Huston et al., Proc. Natl. Acad. Sci. USA 85:5879-5883, 1988). Such antibody fragments can be obtained using conventional techniques known to those of skill in the art, and the fragments can be screened for utility in the same manner as intact antibodies.

[0358] Antigen-binding fragments can be produced by recombinant DNA techniques, enzymatic or chemical cleavage of intact immunoglobulins, or, in some cases, by chemical peptide synthesis procedures known in the art. In some embodiments, antigen-binding fragments (e.g., .g., Fab′, F(ab′)2, Fab, scFab, Fv, rlgG, and scFv fragments) of an anti-CD117 antibody, which are joined by a synthetic linker, are encompassed herein.

[0359] By “base editor (BE),” or “nucleobase editor polypeptide (NBE)” is meant an agent that binds a polynucleotide and has nucleobase modifying activity. In various embodiments, the base editor comprises a nucleobase modifying polypeptide (e.g., a deaminase) and a polynucleotide programmable nucleotide binding domain (e.g., Cas9 or Cpf1) in conjunction with a guide polynucleotide (e.g., guide RNA (gRNA)). Representative nucleic acid and protein sequences of base editors include those sequences with about or at least about 85% sequence identity to any base editor sequence provided in the sequence listing, such as those corresponding to SEQ ID NOs: 2-11.

[0360] By “base editing activity” is meant acting to chemically alter a base within a polynucleotide. In one embodiment, a first base is converted to a second base. In one embodiment, the base editing activity is cytidine deaminase activity, e.g., converting target C·G to T·A. In another embodiment, the base editing activity is adenosine or adenine deaminase activity, e.g., converting A·T to G·C.

[0361] The term “base editor system” refers to an intermolecular complex for editing a nucleobase of a target nucleotide sequence. In various embodiments, the base editor (BE) system comprises (1) a polynucleotide programmable nucleotide binding domain, a deaminase domain (e.g., cytidine deaminase or adenosine deaminase) for deaminating nucleobases in the target nucleotide sequence; and (2) one or more guide polynucleotides (e.g., guide RNA) in conjunction with the polynucleotide programmable nucleotide binding domain. In various embodiments, the base editor (BE) system comprises a nucleobase editor domain selected from an adenosine deaminase or a cytidine deaminase, and a domain having nucleic acid sequence specific binding activity. In some embodiments, the base editor system comprises (1) a base editor (BE) comprising a polynucleotide programmable DNA binding domain and a deaminase domain for deaminating one or more nucleobases in a target nucleotide sequence; and (2) one or more guide RNAs in conjunction with the polynucleotide programmable DNA binding domain. In some embodiments, the polynucleotide programmable nucleotide binding domain is a polynucleotide programmable DNA binding domain. In some embodiments, the base editor is a cytidine base editor (CBE). In some embodiments, the base editor is an adenine or adenosine base editor (ABE). In some embodiments, the base editor is an adenine or adenosine base editor (ABE) or a cytidine or cytosine base editor (CBE). In some embodiments, the base editor system (e.g., a base editor system comprising a cytidine deaminase) comprises a uracil glycosylase inhibitor or other agent or peptide (e.g., a uracil stabilizing protein such as provided in WO2022015969, the disclosure of which is incorporated herein by reference in its entirety for all purposes) that inhibits the inosine base excision repair system.

[0362] By “base editing activity” is meant acting to chemically alter a base within a polynucleotide. In one embodiment, a first base is converted to a second base. In an embodiment, the base editing activity is adenosine or adenine deaminase activity, e.g., converting A·T to G·C.

[0363] The term “base editor system” refers to an intermolecular complex for editing a nucleobase of a target nucleotide sequence. In various embodiments, the base editor (BE) system comprises (1) a polynucleotide programmable nucleotide binding domain, a deaminase domain (e.g., adenosine deaminase) for deaminating nucleobases in the target nucleotide sequence; and (2) one or more guide polynucleotides (e.g., guide RNA) in conjunction with the polynucleotide programmable nucleotide binding domain. In various embodiments, the base editor (BE) system comprises a nucleobase editor domain (e.g., an adenosine deaminase), and a domain having nucleic acid sequence specific binding activity. In some embodiments, the base editor system comprises (1) a base editor (BE) comprising a polynucleotide programmable DNA binding domain and a deaminase domain for deaminating one or more nucleobases in a target nucleotide sequence; and (2) one or more guide RNAs in conjunction with the polynucleotide programmable DNA binding domain. In some embodiments, the polynucleotide programmable nucleotide binding domain is a polynucleotide programmable DNA binding domain. In some embodiments, the base editor is an adenine or adenosine base editor (ABE). In some embodiments, the base editor system (e.g., a base editor system comprising an adenosine deaminase) comprises a uracil glycosylase inhibitor or other agent or peptide that inhibits the inosine base excision repair system.

[0364] By “β-globin (HBB) polypeptide” is meant a polypeptide having at least about 85% amino acid sequence identity to NCBI Accession No. NP_000509, provided below, or a fragment thereof capable of forming a dimer with a HBA1 polypeptide. In particular embodiments, a β-globin protein comprises one or more alterations relative to the following reference sequence. In one particular embodiment, a β-globin protein associated with sickle cell disease comprises an E6V (also termed E7V) mutation.

(SEQ ID NO: 494)
MVHLTPEEKSAVTALWGKVNVDEVGGEALGRLLVVYPWTQRFFESFGDLS
TPDAVMGNPKVKAHGKKVLGAFSDGLAHLDNLKGTFATLSELHCDKLHVD
PENFRLLGNVLVCVLAHHFGKEFTPPVQAAYQKVVAGVANALAHKYH.

[0365] By HBB polynucleotide” is meant a nucleic acid molecule that encodes an HBB polypeptide as well as the introns, exons, 3′ untranslated regions, 5′ untranslated regions, and regulatory sequences associated with its expression, or fragments thereof. In embodiments, a HBB polynucleotide is the genomic sequence, cDNA, mRNA, or gene associated with and/or required for HBB expression. Exemplary HBB polynucleotide sequences from Homo sapiens are provided below (NCBI Ref. Seq. Accessions No. NM_000518 and NG_059281).

(SEQ ID NO: 495)
ACATTTGCTTCTGACACAACTGTGTTCACTAGCAACCTCAAACAGACACC
ATGGTGCATCTGACTCCTGAGGAGAAGTCTGCCGTTACTGCCCTGTGGGG
CAAGGTGAACGTGGATGAAGTTGGTGGTGAGGCCCTGGGCAGGCTGCTGG
TGGTCTACCCTTGGACCCAGAGGTTCTTTGAGTCCTTTGGGGATCTGTCC
ACTCCTGATGCTGTTATGGGCAACCCTAAGGTGAAGGCTCATGGCAAGAA
AGTGCTCGGTGCCTTTAGTGATGGCCTGGCTCACCTGGACAACCTCAAGG
GCACCTTTGCCACACTGAGTGAGCTGCACTGTGACAAGCTGCACGTGGAT
CCTGAGAACTTCAGGCTCCTGGGCAACGTGCTGGTCTGTGTGCTGGCCCA
TCACTTTGGCAAAGAATTCACCCCACCAGTGCAGGCTGCCTATCAGAAAG
TGGTGGCTGGTGTGGCTAATGCCCTGGCCCACAAGTATCACTAAGCTCGC
TTTCTTGCTGTCCAATTTCTATTAAAGGTTCCTTTGTTCCCTAAGTCCAA
CTACTAAACTGGGGGATATTATGAAGGGCCTTGAGCATCTGGATTCTGCC
TAATAAAAAACATTTATTTTCATTGCAA.

>NG_059281.1:5001-6608 Homo sapiens hemoglobin subunit beta (HBB), RefSeqGene (LRG_1232) on chromosome 11; an A altered to T in Sickle cell disease is indicated in bold; the bold-underlined T indicates a SNP that is a C in some sickle cell patients. The underlined ATG is the start codon.

(SEQ ID NO: 940)
ACATTTGCTTCTGACACAACTGTGTTCACTAGCAACCTCAAACAGACACC
ATGGTGCATCTGACTCCTGAGGAGAAGTCTGCCGTTACTGCCCTGTGGGG
CAAGGTGAACGTGGATGAAGTTGGTGGTGAGGCCCTGGGCAGGTTGGTAT
CAAGGTTACAAGACAGGTTTAAGGAGACCAATAGAAACTGGGCATGTGGA
GACAGAGAAGACTCTTGGGTTTCTGATAGGCACTGACTCTCTCTGCCTAT
TGGTCTATTTTCCCACCCTTAGGCTGCTGGTGGTCTACCCTTGGACCCAG
AGGTTCTTTGAGTCCTTTGGGGATCTGTCCACTCCTGATGCTGTTATGGG
CAACCCTAAGGTGAAGGCTCATGGCAAGAAAGTGCTCGGTGCCTTTAGTG
ATGGCCTGGCTCACCTGGACAACCTCAAGGGCACCTTTGCCACACTGAGT
GAGCTGCACTGTGACAAGCTGCACGTGGATCCTGAGAACTTCAGGGTGAG
TCTATGGGACGCTTGATGTTTTCTTTCCCCTTCTTTTCTATGGTTAAGTT
CATGTCATAGGAAGGGGATAAGTAACAGGGTACAGTTTAGAATGGGAAAC
AGACGAATGATTGCATCAGTGTGGAAGTCTCAGGATCGTTTTAGTTTCTT
TTATTTGCTGTTCATAACAATTGTTTTCTTTTGTTTAATTCTTGCTTTCT
TTTTTTTTCTTCTCCGCAATTTTTACTATTATACTTAATGCCTTAACATT
GTGTATAACAAAAGGAAATATCTCTGAGATACATTAAGTAACTTAAAAAA
AAACTTTACACAGTCTGCCTAGTACATTACTATTTGGAATATATGTGTGC
TTATTTGCATATTCATAATCTCCCTACTTTATTTTCTTTTATTTTTAATT
GATACATAATCATTATACATATTTATGGGTTAAAGTGTAATGTTTTAATA
TGTGTACACATATTGACCAAATCAGGGTAATTTTGCATTTGTAATTTTAA
AAAATGCTTTCTTCTTTTAATATACTTTTTTGTTTATCTTATTTCTAATA
CTTTCCCTAATCTCTTTCTTTCAGGGCAATAATGATACAATGTATCATGC
CTCTTTGCACCATTCTAAAGAATAACAGTGATAATTTCTGGGTTAAGGCA
ATAGCAATATCTCTGCATATAAATATTTCTGCATATAAATTGTAACTGAT
GTAAGAGGTTTCATATTGCTAATAGCAGCTACAATCCAGCTACCATTCTG
CTTTTATTTTATGGTTGGGATAAGGCTGGATTATTCTGAGTCCAAGCTAG
GCCCTTTTGCTAATCATGTTCATACCTCTTATCTTCCTCCCACAGCTCCT
GGGCAACGTGCTGGTCTGTGTGCTGGCCCATCACTTTGGCAAAGAATTCA
CCCCACCAGTGCAGGCTGCCTATCAGAAAGTGGTGGCTGGTGTGGCTAAT
GCCCTGGCCCACAAGTATCACTAAGCTCGCTTTCTTGCTGTCCAATTTCT
ATTAAAGGTTCCTTTGTTCCCTAAGTCCAACTACTAAACTGGGGGATATT
ATGAAGGGCCTTGAGCATCTGGATTCTGCCTAATAAAAAACATTTATTTT
CATTGCAA.

[0366] A “binding polypeptide” refers to a polypeptide, or an antigen binding portion or fragment thereof, that has specificity for and specifically binds to a CD117 polypeptide. In an embodiment, a binding polypeptide is an anti-CD117 antibody or immunoglobulin or an antigen binding portion or fragment thereof.

[0367] By “hemoglobin, gamma A (HBG1) polypeptide” is meant a polypeptide having at least about 85% amino acid sequence identity to Genbank Accession No. CAA23771.1, provided below, or a fragment thereof capable of forming a protein complex with alpha hemoglobin subunits.

(SEQ ID NO: 496)
MGHFTEEDKATITSLWGKVNVEDAGGETLGRLLVVYPWTQRFFDSFGNLS
SASAIMGNPKVKAHGKKVLTSLGDAIKHLDDLKGTFAQLSELHCDKLHVD
PENFKLLGNVLVTVLAIHFGKEFTPEVQASWQKMVTAVASALSSRYH.

[0368] By HBG1 polynucleotide” is meant a nucleic acid molecule that encodes an HBG1 polypeptide as well as the introns, exons, 3′ untranslated regions, 5′ untranslated regions, and regulatory sequences associated with its expression, or fragments thereof. In embodiments, a HBG1 polynucleotide is the genomic sequence, cDNA, mRNA, or gene associated with and/or required for HBG1 expression. An exemplary HBB polynucleotide sequence from Homo sapiens is provided on ENSEMBL at accession no. GRCh38:11:5248044:5259425:1, the reverse-complement of which is provided below (SEQ ID NO: 497). In the below sequence, exons encoding HBG1 are shown in bold and an exemplary HBG1 promoter region corresponds to a region 5′ of the first exon encoding HBG1 (e.g., the first 100, 200, 300, or 400 nucleotides 5′ of the first exon), or portions thereof.

(SEQ ID NO: 497)
CCTTCTCACTTGGGTAGGCTCTGTCAGAGGGAAAGTCTAGGCCTCAAGGC
TGAGACTTTTGTCCCATGAGGTGTTCCCTTGATGTAGCACAGTCCCCCTT
TTCCTAGGCGTGGGGCTTCCTGAGAGCCGAACTGTAGTGATTGTTATCTC
TCTTCTGGATCTAGCCACCCATCAGGTCTACCAGACTCCAGGCTGGTACT
GGGGTTTGTCTGCACAGAGTCTTGTGACGTGAACCATCTGTGGGTCTCTC
AGCCATAGATACAACCACCTGCTCCAATGGAGGTGGCAGAGGATGAAATG
GACTCTGTGAGGGTCCTTACTTTTGGTTGTTCAATGCACTATTTTTGTGC
TGGTTGGCCTCCTGCCAGGAGGTGGCACTTTCTAGAAAGCATCAGCAGAG
GCAGTCAGGTGGTGGTGGCTGGGGGGGCTGGGGCACCCTAGAACTCCCAA
GAATATATGCCCTTTGTCTTCAGCTACCAGGGTGAGTAAGGAAGGACCAT
CAGGTGGGGGCAGGACTAGTCGTGTCTGAGCTCAGAGTCTCCTTGGGCAG
GTCTTTCTGTGGCTACTGTGGGAGGATGGGGGTGTAGTTTCCAGGTCAAT
GGATTTATGTTCCTAGGACAATTATGGCTGCCTCTGCTGTGTCATGCAGG
TCATCAGGAAAGTGGGGGAAAGCAAGCAGTCACGTGACTTGCCCAGCTCC
CATGCAACTCAAAAGGTTGGTCTCACTTCCAGCGTGCACCCTCCCCCGCA
ACAGCACCGAATCTGTTTCCATGCAGTCAGTGAGCAAGGCTGAGAACTTG
CCCCAGGCTACCAGCTGCGAAACCAAGTAGGGCTGTCCTACTTCCCTGCC
AGTGGAGTCTGCACACCAAATTCATGTCCCCCCACCAACCCCCCCACTGC
CCAGCCCCTAGATCTGGCCAGGTGGAGATTTTCTTTTTCCTGTCATCTTT
TCCCAGTTCCTCTGGCAGCCCTCCCAAATGACCCCTGTGAGGCAAGGCAG
AAATGGCTTCCTAGGGGACCCAGAGAGCCCACAGGGCTTTTCCCGCTGCT
TCCTCTACCCCTGTATTTTGCTTGGCCCTCTAAATTGACTCAGCTCCAGG
TAAGGTCAGAATCTTCTCCTGTGGTCTAGATCTTCAGGTTCCCCAGTGAG
GATGTGTGTTTGGGGGTAGACGGTCCCCCTTTTCCACTTCCACAGTTTGG
GCACTCACAATATTTGGGGTGTTTCCCGGGTCCTGCAGGAGCAATCTGCT
TCTTTCAGAGGGTGTGTGCGTTCTCTCAGCTTTCTTGATTTATTTCTGCA
GGTGGTTCTGCAAAAAAAATTCCTGATGGGAGACTTCACATGCTGCTCTG
TGCATCCGAGTGGGAGCTGCAATGTACTTCTGCTGCCTCCCATCTGCCAT
CACCCTCTAATTTGTCGGTAATATGCATTTTTAATCAATCTTTTTTTCTC
TCTCTCTCTTTTTCTTCTCCCCCAAAACTATACTGCCCTTTGATATCAAG
GAATCAAGGACGTGATGTTGAGGGGTGGGCAGTGGATACACTCTTTACCC
CTTAGGGAGCTATATCTAGATTTAGATATTGCCAATTCAAGATAACTTAA
TTGAAAGCAAATTCATAATGAATACACACACACACACACACATCTGCATG
ACAAGATTTTTAATAGTTGAAAGAATAACTAATAATTGTCCACAGGCAAT
AAGGGCTTTTTAAGCAAAACAGTTGTGATAAACAGGTCATTCTTAGAATA
GTAATCCAGCCAATAGTACAGGTTGCTTAGAGATTATGTCATTACCAGAG
TTAAAATTCTATAATGGCTTCTCACTCCCTACCACTGAGGACAAGTTTAT
GTCCTTAGGTTTATGCTTCCCTGAAACAATACCACCTGCTATTCTCCACT
TTACATATCAACGGCACTGGTTCTTTATCTAACTCTCTGGCACAGCAGGA
GTTTGTTTTCTTCTGCTTCAGAGCTTTGAATTTACTATTTCAGCTTCTAA
ACTTTATTTGGCAATGCCTTCCCATGGCAGATTCCTTCTGTCATTTTGCC
TCTGTTCGAATACTTTCTCCTTAATTTCATTCTTAGTTAATAATATCTGA
AATTATTTTGTTGTTTAACTTAATTATTAATTTTATGTATGTTCTACCTA
GATTATAATCTTCAGAGGAAAGTTTTATTCTCTGACTTATTTAACTTAAA
TGCCCACTACTTTAAAAATTATGACATTTATTTAACAGATATTTGCTGAA
CAAATGTTTGAAAATACATGGGAAAGAATGCTTGAAAACACTTGAAATTG
CTTGTGTAAAGAAACAGTTTTATCAGTTAGGATTTAATCAATGTCAGAAG
CAATGATATAGGAAAAATCGAGGAATAAGACAGTTATGGATAAGGAGAAA
TCAACAAACTCTTAAAAGATATTGCCTCAAAAGCATAAGAGGAAATAAGG
GTTTATACATGACTTTTAGAACACTGCCTTGGTTTTTGGATAAATGGGGA
AGTTGTTTGAAAACAGGAGGGATCCTAGATATTCCTTAGTCTGAGGAGGA
GCAATTAAGATTCACTTGTTTAGAGGCTGGGAGTGGTGGCTCACGCCTGT
AATCCCAGAATTTTGGGAGGCCAAGGCAGGCAGATCACCTGAGGTCAAGA
GTTCAAGACCAACCTGGCCAACATGGTGAAATCCCATCTCTACAAAAATA
CAAAAATTAGACAGGCATGATGGCAAGTGCCTGTAATCCCAGCTACTTGG
GAGGCTGAGGAAGGAGAATTGCTTGAACCTGGAAGGCAGGAGTTGCAGTG
AGCCGAGATCATACCACTGCACTCCAGCCTGGGTGACAGAACAAGACTCT
GTCTCAAAAAAAAAAAAGAGAGATTCAAAAGATTCACTTGTTTAGGCCTT
AGCGGGCTTAGACACCAGTCTCTGACACATTCTTAAAGGTCAGGCTCTAC
AAATGGAACCCAACCAGACTCTCAGATATGGCCAAAGATCTATACACACC
CATCTCACAGATCCCCTATCTTAAAGAGACCCTAATTTGGGTTCACCTCA
GTCTCTATAATCTGTACCAGCATACCAATAAAAATCTTTCTCACCCATCC
TTAGATTGAGAGAAGTCACTTATTATTATGTGAGTAACTGGAAGATACTG
ATAAGTTGACAAATCTTTTTCTTTCCTTTCTTATTCAACTTTTATTTTAA
CTTCCAAAGAACAAGTGCAATATGTGCAGCTTTGTTGCGCAGGTCAACAT
GTATCTTTCTGGTCTTTTAGCCGCCTAACACTTTGAGCAGATATAAGCCT
TACACAGGATTATGAAGTCTGAAAGGATTCCACCAATATTATTATAATTC
CTATCAACCTGATAGGTTAGGGGAAGGTAGAGCTCTCCTCCAATAAGCCA
GATTTCCAGAGTTTCTGACGTCATAATCTACCAAGGTCATGGATCGAGTT
CAGAGAAAAAACAAAAGCAAAACCAAACCTACCAAAAAATAAAAATCCCA
AAGAAAAAATAAAGAAAAAAACAGCATGAATACTTCCTGCCATGTTAAGT
GGCCAATATGTCAGAAACAGCACTGAGTTACAGATAAAGATGTCTAAACT
ACAGTGACATCCCAGCTGTCACAGTGTGTGGACTATTAGTCAATAAAACA
GTCCCTGCCTCTTAAGAGTTGTTTTCCATGCAAATACATGTCTTATGTCT
TAGAATAAGATTCCCTAAGAAGTGAACCTAGCATTTATACAAGATAATTA
ATTCTAATCCATAGTATCTGGTAAAGAGCATTCTACCATCATCTTTACCG
AGCATAGAAGAGCTACACCAAAACCCTGGGTCATCAGCCAGCACATACAC
TTATCCAGTGATAAATACACATCATCGGGTGCCTACATACATACCTGAAT
ATAAAAAAAATACTTTTGCTGAGATGAAACAGGCGTGATTTATTTCAAAT
AGGTACGGATAAGTAGATATTGAAGTAAGGATTCAGTCTTATATTATATT
ACATAACATTAATCTATTCCTGCACTGAAACTGTTGCTTTATAGGATTTT
TCACTACACTAATGAGAACTTAAGAGATAATGGCCTAAAACCACAGAGAG
TATATTCAAAGATAAGTATAGCACTTCTTATTTGGAAACCAATGCTTACT
AAATGAGACTAAGACGTGTCCCATCAAAAATCCTGGACCTATGCCTAAAA
CACATTTCACAATCCCTGAACTTTTCAAAAATTGGTACATGCTTTAACTT
TAAACTACAGGCCTCACTGGAGCTACAGACAAGAAGGTGAAAAACGGCTG
ACAAAAGAAGTCCTGGTATCTTCTATGGTGGGAGAAGAAAACTAGCTAAA
GGGAAGAATAAATTAGAGAAAAATTGGAATGACTGAATCGGAACAAGGCA
AAGGCTATAAAAAAAATTAAGCAGCAGTATCCTCTTGGGGGCCCCTTCCC
CACACTATCTCAATGCAAATATCTGTCTGAAACGGTCCCTGGCTAAACTC
CACCCATGGGTTGGCCAGCCTTGCCTTGACCAATAGCCTTGACAAGGCAA
ACTTGACCAATAGTCTTAGAGTATCCAGTGAGGCCAGGGGCCGGCGGCTG
GCTAGGGATGAAGAATAAAAGGAAGCACCCTTCAGCAGTTCCACACACTC
GCTTCTGGAACGTCTGAGGTTATCAATAAGCTCCTAGTCCAGACGCCATG
GGTCATTTCACAGAGGAGGACAAGGCTACTATCACAAGCCTGTGGGGCAA
GGTGAATGTGGAAGATGCTGGAGGAGAAACCCTGGGAAGGTAGGCTCTGG
TGACCAGGACAAGGGAGGGAAGGAAGGACCCTGTGCCTGGCAAAAGTCCA
GGTCGCTTCTCAGGATTTGTGGCACCTTCTGACTGTCAAACTGTTCTTGT
CAATCTCACAGGCTCCTGGTTGTCTACCCATGGACCCAGAGGTTCTTTGA
CAGCTTTGGCAACCTGTCCTCTGCCTCTGCCATCATGGGCAACCCCAAAG
TCAAGGCACATGGCAAGAAGGTGCTGACTTCCTTGGGAGATGCCATAAAG
CACCTGGATGATCTCAAGGGCACCTTTGCCCAGCTGAGTGAACTGCACTG
TGACAAGCTGCATGTGGATCCTGAGAACTTCAAGGTGAGTCCAGGAGATG
TTTCAGCACTGTTGCCTTTAGTCTCGAGGCAACTTAGACAACTGAGTATT
GATCTGAGCACAGCAGGGTGTGAGCTGTTTGAAGATACTGGGGTTGGGAG
TGAAGAAACTGCAGAGGACTAACTGGGCTGAGACCCAGTGGCAATGTTTT
AGGGCCTAAGGAGTGCCTCTGAAAATCTAGATGGACAACTTTGACTTTGA
GAAAAGAGAGGTGGAAATGAGGAAAATGACTTTTCTTTATTAGATTTCGG
TAGAAAGAACTTTCACCTTTCCCCTATTTTTGTTATTCGTTTTAAAACAT
CTATCTGGAGGCAGGACAAGTATGGTCATTAAAAAGATGCAGGCAGAAGG
CATATATTGGCTCAGTCAAAGTGGGGAACTTTGGTGGCCAAACATACATT
GCTAAGGCTATTCCTATATCAGCTGGACACATATAAAATGCTGCTAATGC
TTCATTACAAACTTATATCCTTTAATTCCAGATGGGGGCAAAGTATGTCC
AGGGGTGAGGAACAATTGAAACATTTGGGCTGGAGTAGATTTTGAAAGTC
AGCTCTGTGTGTGTGTGTGTGTGTGTGCGCGCGTGTGTTTGTGTGTGTGT
GAGAGCGTGTGTTTCTTTTAACGTTTTCAGCCTACAGCATACAGGGTTCA
TGGTGGCAAGAAGATAACAAGATTTAAATTATGGCCAGTGACTAGTGCTG
CAAGAAGAACAACTACCTGCATTTAATGGGAAAGCAAAATCTCAGGCTTT
GAGGGAAGTTAACATAGGCTTGATTCTGGGTGGAAGCTTGGTGTGTAGTT
ATCTGGAGGCCAGGCTGGAGCTCTCAGCTCACTATGGGTTCATCTTTATT
GTCTCCTTTCATCTCAACAGCTCCTGGGAAATGTGCTGGTGACCGTTTTG
GCAATCCATTTCGGCAAAGAATTCACCCCTGAGGTGCAGGCTTCCTGGCA
GAAGATGGTGACTGGAGTGGCCAGTGCCCTGTCCTCCAGATACCACTGAG
CTCACTGCCCATGATGCAGAGCTTTCAAGGATAGGCTTTATTCTGCAAGC
AATCAAATAATAAATCTATTCTGCTAAGAGATCACACATGGTTGTCTTCA
GTTCTTTTTTTATGTCTTTTTAAATATATGAGCCACAAAGGGTTTTATGT
TGAGGGATGTGTTTATGTGTATTTATACATGGCTATGTGTGTTTGTGTCA
TGTGCACACTCCACACTTTTTTGTTTACGTTAGATGTGGGTTTTGATGAG
CAAATAAAAGAACTAGGCAATAAAGAAACTTGTACATGGGAGTTCTGCAA
GTGGGAGTAAAAGGTGCAGGAGAAATCTGGTTGGAAGAAAGACCTCTATA
GGACAGGACTCCTCAGAAACAGATGTTTTGGAAGAGATGGGGAAAGGTTC
AGTGAAGGGGGCTGAACCCCCTTCCCTGGATTGCAGCACAGCAGCGAGGA
AGGGGCTCAACGAAGAAAAAGTGTTCCAAGCTTTAGGAAGTCAAGGTTTA
GGCAGGGATAGCCATTCTATTTTATTAGGGGCAATACTATTTCCAACGGC
ATCTGGCTTTTCTCAGCCCTTGTGAGGCTCTACAGGGAGGTTGAGGTGTT
AGAGATCAGAGCAGGAAACAGGTTTTTCTTTCCACGGTAACTACAATGAA
GTGATCCTTACTTTACTAAGGAACTTTTCATTTTAAGTGTTGACGCATGC
CTAAAGAGGTGAAATTAATCCCATACCCTTAAGTCTACAGACTGGTCACA
GCATTTCAAGGAGGAGACCTCATTGTAAGCTTCTAGGGAGGTGGGGACTT
AGGTGAAGGAAATGAGCCAGCAGAAGCTCACAAGTCAGCATCAGCGTGTC
ATGTCTCAGCAGCAGAACAGCACGGTCAGATGAAAATATAGTGTGAAGAA
TTTGTATAACATTAATTGAGAAGGCAGATTCACTGGAGTTCTTATATAAT
TGAAAGTTAATGCACGTTAATAAGCAAGAGTTTAGTTTAATGTGATGGTG
TTATGAACTTAACGCTTGTGTCTCCAGAAAATTCACATGCTGAATCCCCA
ACTCCCAATTGGCTCCATTTGTGGGGGAGGCTTTGGAAAAGTAATCAGGT
TTAGAGGAGCTCATGAGAGCAGATCCCCATCATAGAATTATTTTCCTCAT
CAGAAGCAGAGAGATTAGCCATTTCTCTTCCTTCTGGTGAGGACACAGTG
GGAAGTCAGCCACCTGCAACCCAGGAAGAGAGCCCTGACCAGGAACCAGC
AGAAAAGTGAGAAAAAATCCTGTTGTTGAAGTCACCCAGTCTATGCTATT
TTGTTATAGCACCTTGCACTAAGTAAGGCAGATGAAGAAAGAGAAAAAAA
TAAGCTTCGGTGTTCAGTGGATTAGAAACCATGTTTATCTCAGGTTTACA
AATCTCCACTTGTCCTCTGTGTTTCAGAATAAAATACCAACTCTACTACT
CTCATCTGTAAGATGCAAATAGTAAGCCTGAGCCCTTCTGTCTAACTTTG
AATTCTATTTTTTCTTCAACGTACTTTAGGCTTGTAATGTGTTTATATAC
AGTGAAATGTCAAGTTCTTTCTTTATATTTCTTTCTTTCTTTTTTTTCCT
CAGCCTCAGAGTTTTCCACATGCCCTTCCTACTTTCAGGAACTTCTTTCT
CCAAACGTCTTCTGCCTGGCTCCATCAAATCATAAAGGACCCACTTCAAA
TGCCATCACTCACTACCATTTCACAATTCGCACTTTCTTTCTTTGTCCTT
TTTTTTTTTAGTAAAACAAGTTTATAAAAAATTGAAGGAATAAATGAATG
GCTACTTCATAGGCAGAGTAGACGCAAGGGCTACTGGTTGCCGATTTTTA
TTGTTATTTTTCAATAGTATGCTAAACAAGGGGTAGATTATTTATGCTGC
CCATTTTTAGACCATAAAAGATAACTTCCTGATGTTGCCATGGCATTTTT
TTCCTTTTAATTTTATTTCATTTCATTTTAATTTCGAAGGTACATGTGCA
GGATGTGCAGGCTTGTTACATGGGTAAATGTGTGTCTTTCTGGCCTTTTA
GCCATCTGTATCAATGAGCAGATATAAGCTTTACACAGGATCATGAAGGA
TGAAAGAATTTCACCAATATTATAATAATTTCAATCAACCTGATAGCTTA
GGGGATAAACTAATTTGAAGATACAGCTTGCCTCCGATAAGCCAGAATTC
CAGAGCTTCTGGCATTATAATCTAGCAAGGTTAGAGATCATGGATCACTT
TCAGAGAAAAACAAAAACAAACTAACCAAAAGCAAAACAGAACCAAAAAA
CCACCATAAATACTTCCTACCCTGTTAATGGTCCAATATGTCAGAAACAG
CACTGTGTTAGAAATAAAGCTGTCTAAAGTACACTAATATTCGAGTTATA
ATAGTGTGTGGACTATTAGTCAATAAAAACAACCCTTGCCTCTTTAGAGT
TGTTTTCCATGTACACGCACATCTTATGTCTTAGAGTAAGATTCCCTGAG
AAGTGAACCTAGCATTTATACAAGATAATTAATTCTAATCCACAGTACCT
GCCAAAGAACATTCTACCATCATCTTTACTGAGCATAGAAGAGCTACGCC
AAAACCCTGGGTCATCAGCCAGCACACACACTTATCCAGTGGTAAATACA
CATCATCTGGTGTATACATACATACCTGAATATGGAATCAAATATTTTTC
TAAGATGAAACAGTCATGATTTATTTCAAATAGGTACGGATAAGTAGATA
TTGAGGTAAGCATTAGGTCTTATATTATGTAACACTAATCTATTACTGCG
CTGAAACTGTGGCTTTATAGAAATTGTTTTCACTGCACTATTGAGAAATT
AAGAGATAATGGCAAAAGTCACAAAGAGTATATTCAAAAAGAAGTATAGC
ACTTTTTCCTTAGAAACCACTGCTAACTGAAAGAGACTAAGATTTGTCCC
GTCAAAAATCCTGGACCTATGCCTAAAACACATTTCACAATCCCTGAACT
TTTCAAAAATTGGTACATGCTTTAGCTTTAAACTACAGGCCTCACTGGAG
CTAGAGACAAGAAGGTAAAAAACGGCTGACAAAAGAAGTCCTGGTATCCT
CTATGATGGGAGAAGGAAACTAGCTAAAGGGAAGAATAAATTAGAGAAAA
ACTGGAATGACTGAATCGGAACAAGGCAAAGGCTATAAAAAAAATTAGCA
GTATCCTCTTGGGGGCCCCTTCCCCACACTATCTCAATGCAAATATCTGT
CTGAAACGGTCCCTGGCTAAACTCCACCCATGGGTTGGCCAGCCTTGCCT
TGACCAATAGCCTTGACAAGGCAAACTTGACCAATAGTCTTAGAGTATCC
AGTGAGGCCAGGGGCCGGCGGCTGGCTAGGGATGAAGAATAAAAGGAAGC
ACCCTTCAGCAGTTCCACACACTCGCTTCTGGAACGTCTGAGGTTATCAA
TAAGCTCCTAGTCCAGACGCCATGGGTCATTTCACAGAGGAGGACAAGGC
TACTATCACAAGCCTGTGGGGCAAGGTGAATGTGGAAGATGCTGGAGGAG
AAACCCTGGGAAGGTAGGCTCTGGTGACCAGGACAAGGGAGGGAAGGAAG
GACCCTGTGCCTGGCAAAAGTCCAGGTCGCTTCTCAGGATTTGTGGCACC
TTCTGACTGTCAAACTGTTCTTGTCAATCTCACAGGCTCCTGGTTGTCTA
CCCATGGACCCAGAGGTTCTTTGACAGCTTTGGCAACCTGTCCTCTGCCT
CTGCCATCATGGGCAACCCCAAAGTCAAGGCACATGGCAAGAAGGTGCTG
ACTTCCTTGGGAGATGCCACAAAGCACCTGGATGATCTCAAGGGCACCTT
TGCCCAGCTGAGTGAACTGCACTGTGACAAGCTGCATGTGGATCCTGAGA
ACTTCAAGGTGAGTCCAGGAGATGTTTCAGCCCTGTTGCCTTTAGTCTCG
AGGCAACTTAGACAACGGAGTATTGATCTGAGCACAGCAGGGTGTGAGCT
GTTTGAAGATACTGGGGTTGGGGGTGAAGAAACTGCAGAGGACTAACTGG
GCTGAGACCCAGTGGTAATGTTTTAGGGCCTAAGGAGTGCCTCTAAAAAT
CTAGATGGACAATTTTGACTTTGAGAAAAGAGAGGTGGAAATGAGGAAAA
TGACTTTTCTTTATTAGATTCCAGTAGAAAGAACTTTCATCTTTCCCTCA
TTTTTGTTGTTTTAAAACATCTATCTGGAGGCAGGACAAGTATGGTCGTT
AAAAAGATGCAGGCAGAAGGCATATATTGGCTCAGTCAAAGTGGGGAACT
TTGGTGGCCAAACATACATTGCTAAGGCTATTCCTATATCAGCTGGACAC
ATATAAAATGCTGCTAATGCTTCATTACAAACTTATATCCTTTAATTCCA
GATGGGGGCAAAGTATGTCCAGGGGTGAGGAACAATTGAAACATTTGGGC
TGGAGTAGATTTTGAAAGTCAGCTCTGTGTGTGTGTGTGTGTGTGCGCGC
GCGCGTGTGTGTGTGTGTGTCAGCGTGTGTTTCTTTTAACGTCTTCAGCC
TACAACATACAGGGTTCATGGTGGCAAGAAGATAGCAAGATTTAAATTAT
GGCCAGTGACTAGTGCTTGAAGGGGAACAACTACCTGCATTTAATGGGAA
GGCAAAATCTCAGGCTTTGAGGGAAGTTAACATAGGCTTGATTCTGGGTG
GAAGCTTGGTGTGTAGTTATCTGGAGGCCAGGCTGGAGCTCTCAGCTCAC
TATGGGTTCATCTTTATTGTCTCCTTTCATCTCAACAGCTCCTGGGAAAT
GTGCTGGTGACCGTTTTGGCAATCCATTTCGGCAAAGAATTCACCCCTGA
GGTGCAGGCTTCCTGGCAGAAGATGGTGACTGCAGTGGCCAGTGCCCTGT
CCTCCAGATACCACTGAGCTCACTGCCCATGATTCAGAGCTTTCAAGGAT
AGGCTTTATTCTGCAAGCAATACAAATAATAAATCTATTCTGCTGAGAGA
TCACACATGATTTTCTTCAGCTCTTTTTTTTACATCTTTTTAAATATATG
AGCCACAAAGGGTTTATATTGAGGGAAGTGTGTATGTGTATTTCTGCATG
CCTGTTTGTGTTTGTGGTGTGTGCATGCTCCTCATTTATTTTTATATGAG
ATGTGCATTTTGATGAGCAAATAAAAGCAGTAAAGACACTTGTACACGGG
AGTTCTGCAAGTGGGAGTAAATGGTGTAGGAG.

[0369] By “hemoglobin, gamma G (HBG2) polypeptide” is meant a polypeptide having at least about 85% amino acid sequence identity to Genbank Accession No. CAA23773.1, provided below, or a fragment thereof capable of forming a protein complex with alpha hemoglobin subunits.

(SEQ ID NO: 498)
MGHFTEEDKATITSLWGKVNVEDAGGETLGRLLVVYPWTQRFFDSFGNLS
SASAIMGNPKVKAHGKKVLTSLGDAIKHLDDLKGTFAQLSELHCDKLHVD
PENFKLLGNVLVTVLAIHFGKEFTPEVQASWQKMVTGVASALSSRYH.

[0370] By HBG2 polynucleotide” is meant a nucleic acid molecule that encodes an HBG2 polypeptide as well as the introns, exons, 3′ untranslated regions, 5′ untranslated regions, and regulatory sequences associated with its expression, or fragments thereof. In embodiments, a HBG2 polynucleotide is the genomic sequence, cDNA, mRNA, or gene associated with and/or required for HBG2 expression. An exemplary HBB polynucleotide sequence from Homo sapiens is provided on ENSEMBL at accession no. GRCh38:11:5248044:5259425:1, the reverse-complement of which is provided above (SEQ ID NO: 497). In the above sequence (SEQ ID NO: 497), exons encoding HBG2 are shown in bold-underlined text and an exemplary HBG2 promoter region corresponds to a region 5′ of the first exon encoding HBG2 (e.g., the first 100, 200, 300, or 400 nucleotides 5′ of the first exon), or portions thereof.

[0371] The term “Cas9” or “Cas9 domain” refers to an RNA guided nuclease comprising a Cas9 protein, or a fragment thereof (e.g., a protein comprising an active, inactive, or partially active DNA cleavage domain of Cas9, and/or the gRNA binding domain of Cas9). A Cas9 nuclease is also referred to sometimes as a casnl nuclease or a CRISPR (clustered regularly interspaced short palindromic repeat) associated nuclease.

[0372] By “percent chimerism” or “chimerism” is meant the proportion of cells of a given type(s) of interest in a subject that were administered to the subject or altered in the subject or that are descended or derived from the cells administered to or edited in the subject. In some cases, percent chimerism is calculated as the percent of hCD45+ cells in a subject that were administered to the subject or derived or descended from the cells administered to the subject. In embodiments, the cell type of interest is bulk bone marrow, CD34+ cells, CD235a+ cells, CD19+ cells, or CD45+ cells. In embodiments, chimerism is measured in a subject 1 day, 1 wk, 2 wks, 3 wks, 4 wks, 5 wks, 6 wks, 7 wks, 8 wks, 9 wks, 10 wks, 11 wks, 12 wks, 6 months, a year, or longer following administration of cells to the subject. In embodiments, chimerism is measured in a subject 1 day, 1 wk, 2 wks, 3 wks, 4 wks, 5 wks, 6 wks, 7 wks, 8 wks, 9 wks, 10 wks, 11 wks, 12 wks, 6 months, a year, or longer following administration of an anti-CD117 antibody to the subject. In embodiments, the percent chimerism measured at the time point is about or at least about 10%, 20%, 30%, 40%, 50%, 60%, 70%, 80%, 90%, or 100%. In some cases, the percent chimerism is greater than that measured for a subject administered cells expressing a wild type CD117 polypeptide and not base edited according to the methods provided herein to express an altered CD117 polypeptide with reduced binding to an anti-CD117 antibody. As used herein, the term “complementarity determining region” (CDR) refers to a hypervariable region found both in the light chain and the heavy chain variable regions ((VL and VH domains, respectively). CDRs are noncontiguous antigen-binding sites found within the variable regions of both heavy and light chain polypeptides. These particular regions have been described by Kabat et al., J. Biol. Chem. 252:6609-6616, 1977 and Kabat, et al., Sequences of Proteins of Immunological Interest, Fifth Edition, U.S. Department of Health and Human Services, NIH Publication No. 91-3242, 1991; by Chothia et al., (J. Mol. Biol. 196:901-917, 1987), and by MacCallum et al., (J. Mol. Biol. 262:732-745, 1996) where the definitions include overlapping or subsets of amino acid residues when compared against each other. In certain embodiments, the term “CDR” is a CDR as defined by Kabat based on sequence comparisons. The more highly conserved portions of variable regions are called the framework regions (FRs). As is appreciated in the art, the amino acid positions that delineate a hypervariable region of an antibody can vary, depending on the context and the various definitions known in the art. Some positions within a variable domain may be viewed as hybrid hypervariable positions in that these positions can be deemed to be within a hypervariable region under one set of criteria while being deemed to be outside a hypervariable region under a different set of criteria. One or more of these positions can also be found in extended hypervariable regions. The variable regions of native heavy and light chains each comprise four framework regions (FR1, FR2, FR3, FR4) that primarily adopt a beta-sheet configuration, connected by three CDRs (CDR1, CDR2, CDR3), which form loops that connect, and in some cases form part of, the beta-sheet structure. The CDRs in each chain are held together in close proximity by the FR regions in the order FR1-CDR1-FR2-CDR2-FR3-CDR3-FR4, and the CDRs in each antibody chain contribute to the formation of the target binding site of antibodies (see Kabat et al, Sequences of Proteins of Immunological Interest (National Institute of Health, Bethesda, Md. 1987; incorporated herein by reference). As used herein, numbering of immunoglobulin amino acid residues is done according to the immunoglobulin amino acid residue numbering system of Kabat et al, unless otherwise indicated. In various embodiments, complementarity determining regions are identified using any of the methodologies available to one of skill in the art such as those methods described in “Antibody structure-Function Relationships.” Therapeutic Antibody Engineering, edited by William R. Strohl and Lilia M. Strohl, Woodhead Publishing Series in Biomedicine, 2012, 37-56, 459-595, the entirety of which is incorporated herein in its entirety for all purposes, where such methods include, as non-limiting examples, those of Kabat, Chothia, Lefranc, Honegger, Martin, MacCallum, and Zhao. CDRs can be identified using sequence or structure based methods. Various software programs are available to one of skill in the art to identify CDRs for an antibody amino acid sequence. In various embodiments, a CDR as provided herein may be modified to include 1, 2, 3, 4, 5, 6, 7, 8, 9, or 10 additional amino acids and/or to exclude 1, 2, 3, 4, 5, 6, 7, 8, or 9 amino acids at the N-terminal and/or C-terminal end (e.g, in an embodiment VH CDR1 of ABTx025 is modified to be RASQSVSS (SEQ ID NO: 939), rather than QSVSSSY (SEQ ID NO: 438) by extending QSVSSSY (SEQ ID NO: 439) by 3 amino acids at the N-terminus and excluding two amino acids at the C-terminus). The present disclosure contemplates that the CDRs identified for a particular antibody can vary in location or length depending upon the method by which they are determined.

[0373] The term “conservative amino acid substitution” or “conservative mutation” refers to the replacement of one amino acid by another amino acid with a common property. A functional way to define common properties between individual amino acids is to analyze the normalized frequencies of amino acid changes between corresponding proteins of homologous organisms (Schulz, G. E. and Schirmer, R. H., Principles of Protein Structure, Springer-Verlag, New York (1979)). According to such analyses, groups of amino acids can be defined where amino acids within a group exchange preferentially with each other, and therefore resemble each other most in their impact on the overall protein structure (Schulz, G. E. and Schirmer, R. H., supra). Non-limiting examples of conservative mutations include amino acid substitutions of amino acids, for example, lysine for arginine and vice versa such that a positive charge can be maintained; glutamic acid for aspartic acid and vice versa such that a negative charge can be maintained; serine for threonine such that a free-OH can be maintained; and glutamine for asparagine such that a free-NH₂ can be maintained.

[0374] As used herein, the terms “condition” and “conditioning” refer to processes by which a patient is prepared for receipt of a transplant containing hematopoietic stem cells. Such procedures promote the engraftment of a hematopoietic stem cell transplant (for instance, as inferred from a sustained increase in the quantity of viable hematopoietic stem cells within a blood sample isolated from a patient following a conditioning procedure and subsequent hematopoietic stem cell transplantation). According to the methods described herein, a patient may be conditioned for hematopoietic stem cell transplant therapy by administration to the patient of an antibody or antigen-binding fragment thereof capable of binding an antigen expressed by hematopoietic stem cells, such as CD117. Such antibodies are expected to act via complement-mediated cytotoxicity and antibody-dependent cell-mediated cytotoxicity. As described herein, the transplanted cells have been edited so that the antibody no longer binds a CD117 antigen. Administration of an antibody, antigen-binding fragment thereof, drug-antibody conjugate, or chimeric antigen receptor expressing T-cell (CAR-T) capable of binding a CD117 antigen to a patient in need of hematopoietic stem cell transplant therapy can promote the engraftment of a hematopoietic stem cell graft, for example, by selectively depleting endogenous hematopoietic stem cells, thereby creating a vacancy filled by an exogenous hematopoietic stem cell transplant.

[0375] By “complex” is meant a combination of two or more molecules whose interaction relies on inter-molecular forces. Non-limiting examples of inter-molecular forces include covalent and non-covalent interactions. Non-limiting examples of non-covalent interactions include hydrogen bonding, ionic bonding, halogen bonding, hydrophobic bonding, van der Waals interactions (e.g., dipole-dipole interactions, dipole-induced dipole interactions, and London dispersion forces), and π-effects. In an embodiment, a complex comprises polypeptides, polynucleotides, or a combination of one or more polypeptides and one or more polynucleotides. In one embodiment, a complex comprises one or more polypeptides that associate to form a base editor (e.g., base editor comprising a nucleic acid programmable DNA binding protein, such as Cas9, and a deaminase) and a polynucleotide (e.g., a guide RNA). In an embodiment, the complex is held together by hydrogen bonds. It should be appreciated that one or more components of a base editor (e.g., a deaminase, or a nucleic acid programmable DNA binding protein) may associate covalently or non-covalently. As one example, a base editor may include a deaminase covalently linked to a nucleic acid programmable DNA binding protein (e.g., by a peptide bond). Alternatively, a base editor may include a deaminase and a nucleic acid programmable DNA binding protein that associate noncovalently (e.g., where one or more components of the base editor are supplied in trans and associate directly or via another molecule such as a protein or nucleic acid). In an embodiment, one or more components of the complex are held together by hydrogen bonds.

[0376] By “cytosine” or “4-Aminopyrimidin-2 (1H)-one” is meant a purine nucleobase with the molecular formula C₄H₅N₃O, having the structure

[chemical structure]

and corresponding to CAS No. 71-30-7.

[0377] By “cytidine” is meant a cytosine molecule attached to a ribose sugar via a glycosidic bond, having the structure

[chemical structure]

and corresponding to CAS No. 65-46-3. Its molecular formula is C₉H₁₃N₃O₅.

[0378] By “Cytidine Base Editor (CBE)” is meant a base editor comprising a cytidine deaminase.

[0379] By “Cytidine Base Editor (CBE) polynucleotide” is meant a polynucleotide comprising a CBE.

[0380] By “cytidine deaminase” or “cytosine deaminase” is meant a polypeptide or fragment thereof capable of deaminating cytidine or cytosine. In embodiments, the cytidine or cytosine is present in a polynucleotide. In one embodiment, the cytidine deaminase converts cytosine to uracil or 5-methylcytosine to thymine. The terms “cytidine deaminase” and “cytosine deaminase” are used interchangeably throughout the application. Petromyzon marinus cytosine deaminase 1 (PmCDA1) (SEQ ID NO: 13-14), Activation-induced cytidine deaminase (AICDA) (SEQ ID NOs: 15-21), and APOBEC (SEQ ID NOs: 12-61) are exemplary cytidine deaminases. Further exemplary cytidine deaminase (CDA) sequences are provided in the Sequence Listing as SEQ ID NOs: 62-66 and SEQ ID NOs: 67-189. Non-limiting examples of cytidine deaminases include those described in PCT/US20/16288, PCT/US2018/021878, 180802-021804/PCT, PCT/US2018/048969, and PCT/US2016/058344.

[0381] By “cytosine deaminase activity” is meant catalyzing the deamination of cytosine or cytidine. In one embodiment, a polypeptide having cytosine deaminase activity converts an amino group to a carbonyl group. In an embodiment, a cytosine deaminase converts cytosine to uracil (i.e., C to U) or 5-methylcytosine to thymine (i.e., 5mC to T). In some embodiments, a cytosine deaminase as provided herein has increased cytosine deaminase activity (e.g., at least 10-fold, 20-fold, 30-fold, 40-fold, 50-fold, 60-fold, 70-fold, 80-fold, 90-fold, 100-fold or more) relative to a reference cytosine deaminase.

[0382] The term “deaminase” or “deaminase domain,” as used herein, refers to a protein or fragment thereof that catalyzes a deamination reaction.

[0383] “Detect” refers to identifying the presence, absence or amount of the analyte to be detected. In one embodiment, a sequence alteration in a polynucleotide or polypeptide is detected. In another embodiment, the presence of indels is detected.

[0384] By “detectable label” is meant a composition that when linked to a molecule of interest renders the latter detectable, via spectroscopic, photochemical, biochemical, immunochemical, or chemical means. For example, useful labels include radioactive isotopes, magnetic beads, metallic beads, colloidal particles, fluorescent dyes, electron-dense reagents, enzymes (for example, as commonly used in an enzyme linked immunosorbent assay (ELISA)), biotin, digoxigenin, or haptens.

[0385] By “disease” is meant any condition or disorder that damages or interferes with the normal function of a cell, tissue, or organ. Exemplary diseases include diseases amenable to treatment with hematopoietic stem cell transplantation, such as β-thalassemia, sickle cell disease (SCD), or adenosine deaminase deficiency.

[0386] By “dual editing activity” or “dual deaminase activity” is meant having adenosine deaminase and cytidine deaminase activity. In one embodiment, a base editor having dual editing activity has both A→G and C→T activity, wherein the two activities are approximately equal or are within about 10% or 20% of each other. In another embodiment, a dual editor has A→G activity that no more than about 10% or 20% greater than C→T activity. In another embodiment, a dual editor has A→G activity that is no more than about 10% or 20% less than C→T activity. In some embodiments, the adenosine deaminase variant has predominantly cytosine deaminase activity, and little, if any, adenosine deaminase activity. In some embodiments, the adenosine deaminase variant has cytosine deaminase activity, and no significant or no detectable adenosine deaminase activity.

[0387] By “effective amount” is meant the amount of an agent or active compound, e.g., a base editor or antibody as described herein, that is required to ameliorate the symptoms of a disease relative to an untreated patient or an individual without disease, i.e., a healthy individual, or is the amount of the agent or active compound sufficient to elicit a desired biological response. The effective amount of active compound(s) used to practice embodiments of the disclosure for therapeutic treatment of a disease varies depending upon the manner of administration, the age, body weight, and general health of the subject. Ultimately, the attending physician or veterinarian will decide the appropriate amount and dosage regimen. Such amount is referred to as an “effective” amount. In one embodiment, an effective amount is the amount of a base editor of the disclosure sufficient to introduce an alteration in a gene of interest in a cell (e.g., a cell in vitro or in vivo). In one embodiment, an effective amount is the amount of a base editor required to achieve a therapeutic effect. Such therapeutic effect need not be sufficient to alter a pathogenic gene in all cells of a subject, tissue or organ, but only to alter the pathogenic gene in about 1%, 5%, 10%, 25%, 50%, 75% or more of the cells present in a subject, tissue or organ. In one embodiment, an effective amount is sufficient to ameliorate one or more symptoms of a disease.

[0388] By “fragment” is meant a portion of a polypeptide or nucleic acid molecule. This portion contains, at least about 10%, 20%, 30%, 40%, 50%, 60%, 70%, 80%, or 90% of the entire length of the reference nucleic acid molecule or polypeptide. A fragment may contain 10, 20, 30, 40, 50, 60, 70, 80, 90, or 100, 200, 300, 400, 500, 600, 700, 800, 900, or 1000 nucleotides or amino acids. In some embodiments, the fragment is a functional fragment.

[0389] As used herein, the term “framework region” or “FR region” includes amino acid residues that are adjacent to the CDRs. FR region residues may be present in, for example, human antibodies, rodent-derived antibodies (e.g., murine antibodies), humanized antibodies, primatized antibodies, chimeric antibodies, antibody fragments (e.g., Fab fragments), single-chain antibody fragments (e.g., scFv fragments), antibody domains, and bispecific antibodies, among others.

[0390] By “guide polynucleotide” is meant a polynucleotide or polynucleotide complex which is specific for a target sequence and can form a complex with a polynucleotide programmable nucleotide binding domain protein (e.g., Cas9 or Cpf1). In an embodiment, the guide polynucleotide is a guide RNA (gRNA). gRNAs can exist as a complex of two or more RNAs, or as a single RNA molecule.

[0391] As used herein, the term “hematopoietic stem cells” (“HSCs”) refers to immature blood cells having the capacity to self-renew and to differentiate into mature blood cells containing diverse lineages including but not limited to granulocytes (e.g., promyelocytes, neutrophils, eosinophils, basophils), erythrocytes (e.g., reticulocytes, erythrocytes), thrombocytes (e.g., megakaryoblasts, platelet producing megakaryocytes, platelets), monocytes (e.g., monocytes, macrophages), dendritic cells, microglia, osteoclasts, and lymphocytes (e.g., NK cells, B-cells and T-cells). Such cells may include CD34+ cells. CD34+ cells are immature cells that express the CD34 cell surface marker. In humans, CD34+ cells are believed to include a subpopulation of cells with the stem cell properties defined above, whereas in mice, HSCs are CD34−. In addition, HSCs also refer to long term repopulating HSCs (LT-HSC) and short term repopulating HSCs (ST-HSC). LT-HSCs and ST-HSCs are differentiated, based on functional potential and on cell surface marker expression. For example, human HSCs are CD34+, CD38−, CD45RA−, CD90+, CD49F+, and lin− (negative for mature lineage markers including CD2, CD3, CD4, CD7, CD8, CD10, CD11B, CD19, CD20, CD56, CD235A). In mice, bone marrow LT-HSCs are CD34−, SCA-1+, C-kit+, CD135−, Slamfl/CD150+, CD48−, and lin− (negative for mature lineage markers including Ter119, CD11b, Gr1, CD3, CD4, CD8, B220, IL7ra), whereas ST-HSCs are CD34+, SCA-1+, C-kit+, CD135−, Slamfl/CD150+, and lin− (negative for mature lineage markers including Ter1 19, CD11b, Gr1, CD3, CD4, CD8, B220, IL7ra). In addition, ST-HSCs are less quiescent and more proliferative than LT-HSCs under homeostatic conditions. However, LT-HSC have greater self-renewal potential (i.e., they survive throughout adulthood, and can be serially transplanted through successive recipients), whereas ST-HSCs have limited self-renewal (i.e., they survive for only a limited period of time, and do not possess serial transplantation potential). Any of these HSCs can be used in the methods described herein. ST-HSCs are particularly useful because they are highly proliferative and thus, can more quickly give rise to differentiated progeny.

[0392] As used herein, the term “hematopoietic stem cell functional potential” refers to the functional properties of hematopoietic stem cells which include 1) multi-potency (which refers to the ability to differentiate into multiple different blood lineages including, but not limited to, granulocytes (e.g., promyelocytes, neutrophils, eosinophils, basophils), erythrocytes (e.g., reticulocytes, erythrocytes), thrombocytes (e.g., megakaryoblasts, platelet producing megakaryocytes, platelets), monocytes (e.g., monocytes, macrophages), dendritic cells, microglia, osteoclasts, and lymphocytes (e.g., NK cells, B-cells and T-cells), 2) self-renewal (which refers to the ability of hematopoietic stem cells to give rise to daughter cells that have equivalent potential as the mother cell, and further that this ability can repeatedly occur throughout the lifetime of an individual without exhaustion), and 3) the ability of hematopoietic stem cells or progeny thereof to be reintroduced into a transplant recipient whereupon they home to the hematopoietic stem cell niche (e.g., the bone marrow niche) and re-establish productive and sustained hematopoiesis.”

[0393] By “increases” is meant a positive alteration of at least 10%, 25%, 50%, 75%, or 100%, or about 1.5 fold, about 2 fold, about 3-fold, about 4-fold, about 5-fold, about 6-fold, about 7-fold, about 8-fold, about 9-fold, about 10-fold, about 15-fold, about 20-fold, about 25-fold, about 30-fold, about 35-fold, about 40-fold, about 45-fold, about 50-fold, or about 100-fold.

[0394] The terms “inhibitor of base repair”, “base repair inhibitor”, “IBR” or their grammatical equivalents refer to a protein that is capable in inhibiting the activity of a nucleic acid repair enzyme, for example a base excision repair enzyme.

[0395] An “intein” is a fragment of a protein that is able to excise itself and join the remaining fragments (the exteins) with a peptide bond in a process known as protein splicing.

[0396] The terms “isolated,” “purified,” or “biologically pure” refer to material that is free to varying degrees from components which normally accompany it as found in its native state. “Isolate” denotes a degree of separation from original source or surroundings. “Purify” denotes a degree of separation that is higher than isolation. A “purified” or “biologically pure” protein is sufficiently free of other materials such that any impurities do not materially affect the biological properties of the protein or cause other adverse consequences. That is, a nucleic acid or peptide of this disclosure is purified if it is substantially free of cellular material, viral material, or culture medium when produced by recombinant DNA techniques, or chemical precursors or other chemicals when chemically synthesized. Purity and homogeneity are typically determined using analytical chemistry techniques, for example, polyacrylamide gel electrophoresis or high-performance liquid chromatography. The term “purified” can denote that a nucleic acid or protein gives rise to essentially one band in an electrophoretic gel. For a protein that can be subjected to modifications, for example, phosphorylation or glycosylation, different modifications may give rise to different isolated proteins, which can be separately purified.

[0397] By “isolated polynucleotide” is meant a nucleic acid molecule that is free of the genes which, in the naturally occurring genome of the organism from which the nucleic acid molecule of the disclosure is derived, flank the gene. The term therefore includes, for example, a recombinant DNA that is incorporated into a vector; into an autonomously replicating plasmid or virus; or into the genomic DNA of a prokaryote or eukaryote; or that exists as a separate molecule (for example, a cDNA or a genomic or cDNA fragment produced by PCR or restriction endonuclease digestion) independent of other sequences. In addition, the term includes an RNA molecule that is transcribed from a DNA molecule, as well as a recombinant DNA that is part of a hybrid gene encoding additional polypeptide sequence.

[0398] By an “isolated polypeptide” is meant a polypeptide of the disclosure that has been separated from components that naturally accompany it. Typically, the polypeptide is isolated when it is at least 60%, by weight, free from the proteins and naturally occurring organic molecules with which it is naturally associated. In some embodiments, the preparation is at least 75%, 90%, or 99%, by weight, a polypeptide of the disclosure. An isolated polypeptide of the disclosure may be obtained, for example, by extraction from a natural source, by expression of a recombinant nucleic acid encoding such a polypeptide; or by chemically synthesizing the protein. Purity can be measured by any appropriate method, for example, column chromatography, polyacrylamide gel electrophoresis, or by HPLC analysis.

[0399] By “cluster of differentiation 117 (CD117; C-kit; SCFR) polypeptide” is meant a polypeptide having at least about 85% amino acid sequence identity to an amino acid sequence provided at GenBank Accession No. NP_000213, which is provided below, or a fragment thereof that binds an anti-CD117 antibody. CD117 (KIT) is a type III receptor tyrosine kinase operating in cell signal transduction in several cell types. Normally KIT is activated (phosphorylated) by binding of its ligand, the stem cell factor (SCF). This leads to a phosphorylation cascade ultimately activating various transcription factors in different cell types. Such activation regulates apoptosis, cell differentiation, proliferation, chemotaxis, and cell adhesion. In some embodiments, an CD117 polypeptide or fragment thereof has SCF signaling activity.

>NP_000213.1 mast/stem cell growth factor
receptor Kit isoform 1 precursor [Homo sapiens]
(SEQ ID NO: 499)
MRGARGAWDFLCVLLLLLRVQTGSSQPSVSPGEPSPPSIHPGKSDLIVRV
GDEIRLLCTDPGFVKWTFEILDETNENKQNEWITEKAEATNTGKYTCTNK
HGLSNSIYVFVRDPAKLFLVDRSLYGKEDNDTLVRCPLTDPEVTNYSLKG
CQGKPLPKDLRFIPDPKAGIMIKSVKRAYHRLCLHCSVDQEGKSVLSEKF
ILKVRPAFKAVPVVSVSKASYLLREGEEFTVTCTIKDVSSSVYSTWKREN
SQTKLQEKYNSWHHGDFNYERQATLTISSARVNDSGVFMCYANNTFGSAN
VTTTLEVVDKGFINIFPMINTTVFVNDGENVDLIVEYEAFPKPEHQQWIY
MNRTFTDKWEDYPKSENESNIRYVSELHLTRLKGTEGGTYTFLVSNSDVN
AAIAFNVYVNTKPEILTYDRLVNGMLQCVAAGFPEPTIDWYFCPGTEQRC
SASVLPVDVQTLNSSGPPFGKLVVQSSIDSSAFKHINGTVECKAYNDVGK
TSAYFNFAFKGNNKEQIHPHTLFTPLLIGFVIVAGMMCIIVMILTYKYLQ
KPMYEVQWKVVEEINGNNYVYIDPTQLPYDHKWEFPRNRLSFGKTLGAGA
FGKVVEATAYGLIKSDAAMTVAVKMLKPSAHLTEREALMSELKVLSYLGN
HMNIVNLLGACTIGGPTLVITEYCCYGDLLNFLRRKRDSFICSKQEDHAE
AALYKNLLHSKESSCSDSTNEYMDMKPGVSYVVPTKADKRRSVRIGSYIE
RDVTPAIMEDDELALDLEDLLSFSYQVAKGMAFLASKNCIHRDLAARNIL
LTHGRITKICDFGLARDIKNDSNYVVKGNARLPVKWMAPESIFNCVYTFE
SDVWSYGIFLWELFSLGSSPYPGMPVDSKFYKMIKEGFRMLSPEHAPAEM
YDIMKTCWDADPLKRPTFKQIVQLIEKQISESTNHIYSNLANCSPNRQKP
VVDHSVRINSVGSTASSSQPLLVHDDV
>CD117 variant with S261G alteration and
N260D alteration (shown in bold-underline)
(SEQ ID NO: 1134)
MRGARGAWDFLCVLLLLLRVQTGSSQPSVSPGEPSPPSIHPGKSDLIVRV
GDEIRLLCTDPGFVKWTFEILDETNENKQNEWITEKAEATNTGKYTCTNK
HGLSNSIYVFVRDPAKLFLVDRSLYGKEDNDTLVRCPLTDPEVTNYSLKG
CQGKPLPKDLRFIPDPKAGIMIKSVKRAYHRLCLHCSVDQEGKSVLSEKF
ILKVRPAFKAVPVVSVSKASYLLREGEEFTVTCTIKDVSSSVYSTWKREN
SQTKLQEKYDGWHHGDFNYERQATLTISSARVNDSGVFMCYANNTFGSAN
VTTTLEVVDKGFINIFPMINTTVFVNDGENVDLIVEYEAFPKPEHQQWIY
MNRTFTDKWEDYPKSENESNIRYVSELHLTRLKGTEGGTYTFLVSNSDVN
AAIAFNVYVNTKPEILTYDRLVNGMLQCVAAGFPEPTIDWYFCPGTEQRC
SASVLPVDVQTLNSSGPPFGKLVVQSSIDSSAFKHNGTVECKAYNDVGKT
SAYFNFAFKGNNKEQIHPHTLFTPLLIGFVIVAGMMCIIVMILTYKYLQK
PMYEVQWKVVEEINGNNYVYIDPTQLPYDHKWEFPRNRLSFGKTLGAGAF
GKVVEATAYGLIKSDAAMTVAVKMLKPSAHLTEREALMSELKVLSYLGNH
MNIVNLLGACTIGGPTLVITEYCCYGDLLNFLRRKRDSFICSKQEDHAEA
ALYKNLLHSKESSCSDSTNEYMDMKPGVSYVVPTKADKRRSVRIGSYIER
DVTPAIMEDDELALDLEDLLSFSYQVAKGMAFLASKNCIHRDLAARNILL
THGRITKICDFGLARDIKNDSNYVVKGNARLPVKWMAPESIFNCVYTFES
DVWSYGIFLWELFSLGSSPYPGMPVDSKFYKMIKEGFRMLSPEHAPAEMY
DIMKTCWDADPLKRPTFKQIVQLIEKQISESTNHIYSNLANCSPNRQKPV
VDHSVRINSVGSTASSSQPLLVHDDV
>CD117 variant with S261G alteration
(shown in bold-underline)
(SEQ ID NO: 1135)
MRGARGAWDFLCVLLLLLRVQTGSSQPSVSPGEPSPPSIHPGKSDLIVRV
GDEIRLLCTDPGFVKWTFEILDETNENKQNEWITEKAEATNTGKYTCTNK
HGLSNSIYVFVRDPAKLFLVDRSLYGKEDNDTLVRCPLTDPEVTNYSLKG
CQGKPLPKDLRFIPDPKAGIMIKSVKRAYHRLCLHCSVDQEGKSVLSEKF
ILKVRPAFKAVPVVSVSKASYLLREGEEFTVTCTIKDVSSSVYSTWKREN
SQTKLQEKYNGWHHGDFNYERQATLTISSARVNDSGVFMCYANNTFGSAN
VTTTLEVVDKGFINIFPMINTTVFVNDGENVDLIVEYEAFPKPEHQQWIY
MNRTFTDKWEDYPKSENESNIRYVSELHLTRLKGTEGGTYTFLVSNSDVN
AAIAFNVYVNTKPEILTYDRLVNGMLQCVAAGFPEPTIDWYFCPGTEQRC
SASVLPVDVQTLNSSGPPFGKLVVQSSIDSSAFKHNGTVECKAYNDVGKT
SAYFNFAFKGNNKEQIHPHTLFTPLLIGFVIVAGMMCIIVMILTYKYLQK
PMYEVQWKVVEEINGNNYVYIDPTQLPYDHKWEFPRNRLSFGKTLGAGAF
GKVVEATAYGLIKSDAAMTVAVKMLKPSAHLTEREALMSELKVLSYLGNH
MNIVNLLGACTIGGPTLVITEYCCYGDLLNFLRRKRDSFICSKQEDHAEA
ALYKNLLHSKESSCSDSTNEYMDMKPGVSYVVPTKADKRRSVRIGSYIER
DVTPAIMEDDELALDLEDLLSFSYQVAKGMAFLASKNCIHRDLAARNILL
THGRITKICDFGLARDIKNDSNYVVKGNARLPVKWMAPESIFNCVYTFES
DVWSYGIFLWELFSLGSSPYPGMPVDSKFYKMIKEGFRMLSPEHAPAEMY
DIMKTCWDADPLKRPTFKQIVQLIEKQISESTNHIYSNLANCSPNRQKPV
VDHSVRINSVGSTASSSQPLLVHDDV
>CD117 variant with Y259C and N260D
alterations (shown in bold-underline)
(SEQ ID NO: 1136)
MRGARGAWDFLCVLLLLLRVQTGSSQPSVSPGEPSPPSIHPGKSDLIVRV
GDEIRLLCTDPGFVKWTFEILDETNENKQNEWITEKAEATNTGKYTCTNK
HGLSNSIYVFVRDPAKLFLVDRSLYGKEDNDTLVRCPLTDPEVTNYSLKG
CQGKPLPKDLRFIPDPKAGIMIKSVKRAYHRLCLHCSVDQEGKSVLSEKF
ILKVRPAFKAVPVVSVSKASYLLREGEEFTVTCTIKDVSSSVYSTWKREN
SQTKLQEKCDSWHHGDFNYERQATLTISSARVNDSGVFMCYANNTFGSAN
VTTTLEVVDKGFINIFPMINTTVFVNDGENVDLIVEYEAFPKPEHQQWIY
MNRTFTDKWEDYPKSENESNIRYVSELHLTRLKGTEGGTYTFLVSNSDVN
AAIAFNVYVNTKPEILTYDRLVNGMLQCVAAGFPEPTIDWYFCPGTEQRC
SASVLPVDVQTLNSSGPPFGKLVVQSSIDSSAFKHINGTVECKAYNDVGK
TSAYFNFAFKGNNKEQIHPHTLFTPLLIGFVIVAGMMCIIVMILTYKYLQ
KPMYEVQWKVVEEINGNNYVYIDPTQLPYDHKWEFPRNRLSFGKTLGAGA
FGKVVEATAYGLIKSDAAMTVAVKMLKPSAHLTEREALMSELKVLSYLGN
HMNIVNLLGACTIGGPTLVITEYCCYGDLLNFLRRKRDSFICSKQEDHAE
AALYKNLLHSKESSCSDSTNEYMDMKPGVSYVVPTKADKRRSVRIGSYIE
RDVTPAIMEDDELALDLEDLLSFSYQVAKGMAFLASKNCIHRDLAARNIL
LTHGRITKICDFGLARDIKNDSNYVVKGNARLPVKWMAPESIFNCVYTFE
SDVWSYGIFLWELFSLGSSPYPGMPVDSKFYKMIKEGFRMLSPEHAPAEM
YDIMKTCWDADPLKRPTFKQIVQLIEKQISESTNHIYSNLANCSPNRQKP
VVDHSVRINSVGSTASSSQPLLVHDDV
>CD117 variant with an N260D alteration
(shown in bold-underline)
(SEQ ID NO: 1137)
MRGARGAWDFLCVLLLLLRVQTGSSQPSVSPGEPSPPSIHPGKSDLIVRV
GDEIRLLCTDPGFVKWTFEILDETNENKQNEWITEKAEATNTGKYTCTNK
HGLSNSIYVFVRDPAKLFLVDRSLYGKEDNDTLVRCPLTDPEVTNYSLKG
CQGKPLPKDLRFIPDPKAGIMIKSVKRAYHRLCLHCSVDQEGKSVLSEKF
ILKVRPAFKAVPVVSVSKASYLLREGEEFTVTCTIKDVSSSVYSTWKREN
SQTKLQEKYDSWHHGDFNYERQATLTISSARVNDSGVFMCYANNTFGSAN
VTTTLEVVDKGFINIFPMINTTVFVNDGENVDLIVEYEAFPKPEHQQWIY
MNRTFTDKWEDYPKSENESNIRYVSELHLTRLKGTEGGTYTFLVSNSDVN
AAIAFNVYVNTKPEILTYDRLVNGMLQCVAAGFPEPTIDWYFCPGTEQRC
SASVLPVDVQTLNSSGPPFGKLVVQSSIDSSAFKHINGTVECKAYNDVGK
TSAYFNFAFKGNNKEQIHPHTLFTPLLIGFVIVAGMMCIIVMILTYKYLQ
KPMYEVQWKVVEEINGNNYVYIDPTQLPYDHKWEFPRNRLSFGKTLGAGA
FGKVVEATAYGLIKSDAAMTVAVKMLKPSAHLTEREALMSELKVLSYLGN
HMNIVNLLGACTIGGPTLVITEYCCYGDLLNFLRRKRDSFICSKQEDHAE
AALYKNLLHSKESSCSDSTNEYMDMKPGVSYVVPTKADKRRSVRIGSYIE
RDVTPAIMEDDELALDLEDLLSFSYQVAKGMAFLASKNCIHRDLAARNIL
LTHGRITKICDFGLARDIKNDSNYVVKGNARLPVKWMAPESIFNCVYTFE
SDVWSYGIFLWELFSLGSSPYPGMPVDSKFYKMIKEGFRMLSPEHAPAEM
YDIMKTCWDADPLKRPTFKQIVQLIEKQISESTNHIYSNLANCSPNRQKP
VVDHSVRINSVGSTASSSQPLLVHDDV
>CD117 variant with an S251G alteration
(shown in bold-underline)
(SEQ ID NO: 1138)
MRGARGAWDFLCVLLLLLRVQTGSSQPSVSPGEPSPPSIHPGKSDLIVRV
GDEIRLLCTDPGFVKWTFEILDETNENKQNEWITEKAEATNTGKYTCTNK
HGLSNSIYVFVRDPAKLFLVDRSLYGKEDNDTLVRCPLTDPEVTNYSLKG
CQGKPLPKDLRFIPDPKAGIMIKSVKRAYHRLCLHCSVDQEGKSVLSEKF
ILKVRPAFKAVPVVSVSKASYLLREGEEFTVTCTIKDVSSSVYSTWKREN
GQTKLQEKYNSWHHGDFNYERQATLTISSARVNDSGVFMCYANNTFGSAN
VTTTLEVVDKGFINIFPMINTTVFVNDGENVDLIVEYEAFPKPEHQQWIY
MNRTFTDKWEDYPKSENESNIRYVSELHLTRLKGTEGGTYTFLVSNSDVN
AAIAFNVYVNTKPEILTYDRLVNGMLQCVAAGFPEPTIDWYFCPGTEQRC
SASVLPVDVQTLNSSGPPFGKLVVQSSIDSSAFKHINGTVECKAYNDVGK
TSAYFNFAFKGNNKEQIHPHTLFTPLLIGFVIVAGMMCIIVMILTYKYLQ
KPMYEVQWKVVEEINGNNYVYIDPTQLPYDHKWEFPRNRLSFGKTLGAGA
FGKVVEATAYGLIKSDAAMTVAVKMLKPSAHLTEREALMSELKVLSYLGN
HMNIVNLLGACTIGGPTLVITEYCCYGDLLNFLRRKRDSFICSKQEDHAE
AALYKNLLHSKESSCSDSTNEYMDMKPGVSYVVPTKADKRRSVRIGSYIE
RDVTPAIMEDDELALDLEDLLSFSYQVAKGMAFLASKNCIHRDLAARNIL
LTHGRITKICDFGLARDIKNDSNYVVKGNARLPVKWMAPESIFNCVYTFE
SDVWSYGIFLWELFSLGSSPYPGMPVDSKFYKMIKEGFRMLSPEHAPAEM
YDIMKTCWDADPLKRPTFKQIVQLIEKQISESTNHIYSNLANCSPNRQKP
VVDHSVRINSVGSTASSSQPLLVHDDV

[0400] By “cluster of differentiation 117 (CD117; C-kit; SCFR) polynucleotide” is meant a nucleic acid molecule that encodes a CD117 polypeptide as well as the introns, exons, 3′ untranslated regions, 5′ untranslated regions, and regulatory sequences associated with its expression, or fragments thereof. In embodiments, a CD117 polynucleotide is the genomic sequence, cDNA, mRNA, or gene associated with and/or required for CD117 expression. An exemplary CD117 polynucleotide sequence from Homo sapiens is provided below (NCBI Ref. Seq. Accession No. NM_000222.2), and an exemplary CD117 gene sequence is provided at ENSEMBL Accession No. ENSG00000157404.

>NM_000222.2 Homo sapiens KIT proto-oncogene, receptor tyrosine
kinase (KIT), transcript variant 1, mRNA
(SEQ ID NO: 500)
TCTGGGGGCTCGGCTTTGCCGCGCTCGCTGCACTTGGGCGAGAGCTGGAACGTGGACCAGAGCT
CGGATCCCATCGCAGCTACCGCGATGAGAGGCGCTCGCGGCGCCTGGGATTTTCTCTGCGTTCT
GCTCCTACTGCTTCGCGTCCAGACAGGCTCTTCTCAACCATCTGTGAGTCCAGGGGAACCGTCT
CCACCATCCATCCATCCAGGAAAATCAGACTTAATAGTCCGCGTGGGCGACGAGATTAGGCTGT
TATGCACTGATCCGGGCTTTGTCAAATGGACTTTTGAGATCCTGGATGAAACGAATGAGAATAA
GCAGAATGAATGGATCACGGAAAAGGCAGAAGCCACCAACACCGGCAAATACACGTGCACCAAC
AAACACGGCTTAAGCAATTCCATTTATGTGTTTGTTAGAGATCCTGCCAAGCTTTTCCTTGTTG
ACCGCTCCTTGTATGGGAAAGAAGACAACGACACGCTGGTCCGCTGTCCTCTCACAGACCCAGA
AGTGACCAATTATTCCCTCAAGGGGTGCCAGGGGAAGCCTCTTCCCAAGGACTTGAGGTTTATT
CCTGACCCCAAGGCGGGCATCATGATCAAAAGTGTGAAACGCGCCTACCATCGGCTCTGTCTGC
ATTGTTCTGTGGACCAGGAGGGCAAGTCAGTGCTGTCGGAAAAATTCATCCTGAAAGTGAGGCC
AGCCTTCAAAGCTGTGCCTGTTGTGTCTGTGTCCAAAGCAAGCTATCTTCTTAGGGAAGGGGAA
GAATTCACAGTGACGTGCACAATAAAAGATGTGTCTAGTTCTGTGTACTCAACGTGGAAAAGAG
AAAACAGTCAGACTAAACTACAGGAGAAATATAATAGCTGGCATCACGGTGACTTCAATTATGA
ACGTCAGGCAACGTTGACTATCAGTTCAGCGAGAGTTAATGATTCTGGAGTGTTCATGTGTTAT
GCCAATAATACTTTTGGATCAGCAAATGTCACAACAACCTTGGAAGTAGTAGATAAAGGATTCA
TTAATATCTTCCCCATGATAAACACTACAGTATTTGTAAACGATGGAGAAAATGTAGATTTGAT
TGTTGAATATGAAGCATTCCCCAAACCTGAACACCAGCAGTGGATCTATATGAACAGAACCTTC
ACTGATAAATGGGAAGATTATCCCAAGTCTGAGAATGAAAGTAATATCAGATACGTAAGTGAAC
TTCATCTAACGAGATTAAAAGGCACCGAAGGAGGCACTTACACATTCCTAGTGTCCAATTCTGA
CGTCAATGCTGCCATAGCATTTAATGTTTATGTGAATACAAAACCAGAAATCCTGACTTACGAC
AGGCTCGTGAATGGCATGCTCCAATGTGTGGCAGCAGGATTCCCAGAGCCCACAATAGATTGGT
ATTTTTGTCCAGGAACTGAGCAGAGATGCTCTGCTTCTGTACTGCCAGTGGATGTGCAGACACT
AAACTCATCTGGGCCACCGTTTGGAAAGCTAGTGGTTCAGAGTTCTATAGATTCTAGTGCATTC
AAGCACAATGGCACGGTTGAATGTAAGGCTTACAACGATGTGGGCAAGACTTCTGCCTATTTTA
ACTTTGCATTTAAAGGTAACAACAAAGAGCAAATCCATCCCCACACCCTGTTCACTCCTTTGCT
GATTGGTTTCGTAATCGTAGCTGGCATGATGTGCATTATTGTGATGATTCTGACCTACAAATAT
TTACAGAAACCCATGTATGAAGTACAGTGGAAGGTTGTTGAGGAGATAAATGGAAACAATTATG
TTTACATAGACCCAACACAACTTCCTTATGATCACAAATGGGAGTTTCCCAGAAACAGGCTGAG
TTTTGGGAAAACCCTGGGTGCTGGAGCTTTCGGGAAGGTTGTTGAGGCAACTGCTTATGGCTTA
ATTAAGTCAGATGCGGCCATGACTGTCGCTGTAAAGATGCTCAAGCCGAGTGCCCATTTGACAG
AACGGGAAGCCCTCATGTCTGAACTCAAAGTCCTGAGTTACCTTGGTAATCACATGAATATTGT
GAATCTACTTGGAGCCTGCACCATTGGAGGGCCCACCCTGGTCATTACAGAATATTGTTGCTAT
GGTGATCTTTTGAATTTTTTGAGAAGAAAACGTGATTCATTTATTTGTTCAAAGCAGGAAGATC
ATGCAGAAGCTGCACTTTATAAGAATCTTCTGCATTCAAAGGAGTCTTCCTGCAGCGATAGTAC
TAATGAGTACATGGACATGAAACCTGGAGTTTCTTATGTTGTCCCAACCAAGGCCGACAAAAGG
AGATCTGTGAGAATAGGCTCATACATAGAAAGAGATGTGACTCCCGCCATCATGGAGGATGACG
AGTTGGCCCTAGACTTAGAAGACTTGCTGAGCTTTTCTTACCAGGTGGCAAAGGGCATGGCTTT
CCTCGCCTCCAAGAATTGTATTCACAGAGACTTGGCAGCCAGAAATATCCTCCTTACTCATGGT
CGGATCACAAAGATTTGTGATTTTGGTCTAGCCAGAGACATCAAGAATGATTCTAATTATGTGG
TTAAAGGAAACGCTCGACTACCTGTGAAGTGGATGGCACCTGAAAGCATTTTCAACTGTGTATA
CACGTTTGAAAGTGACGTCTGGTCCTATGGGATTTTTCTTTGGGAGCTGTTCTCTTTAGGAAGC
AGCCCCTATCCTGGAATGCCGGTCGATTCTAAGTTCTACAAGATGATCAAGGAAGGCTTCCGGA
TGCTCAGCCCTGAACACGCACCTGCTGAAATGTATGACATAATGAAGACTTGCTGGGATGCAGA
TCCCCTAAAAAGACCAACATTCAAGCAAATTGTTCAGCTAATTGAGAAGCAGATTTCAGAGAGC
ACCAATCATATTTACTCCAACTTAGCAAACTGCAGCCCCAACCGACAGAAGCCCGTGGTAGACC
ATTCTGTGCGGATCAATTCTGTCGGCAGCACCGCTTCCTCCTCCCAGCCTCTGCTTGTGCACGA
CGATGTCTGAGCAGAATCAGTGTTTGGGTCACCCCTCCAGGAATGATCTCTTCTTTTGGCTTCC
ATGATGGTTATTTTCTTTTCTTTCAACTTGCATCCAACTCCAGGATAGTGGGCACCCCACTGCA
ATCCTGTCTTTCTGAGCACACTTTAGTGGCCGATGATTTTTGTCATCAGCCACCATCCTATTGC
AAAGGTTCCAACTGTATATATTCCCAATAGCAACGTAGCTTCTACCATGAACAGAAAACATTCT
GATTTGGAAAAAGAGAGGGAGGTATGGACTGGGGGCCAGAGTCCTTTCCAAGGCTTCTCCAATT
CTGCCCAAAAATATGGTTGATAGTTTACCTGAATAAATGGTAGTAATCACAGTTGGCCTTCAGA
ACCATCCATAGTAGTATGATGATACAAGATTAGAAGCTGAAAACCTAAGTCCTTTATGTGGAAA
ACAGAACATCATTAGAACAAAGGACAGAGTATGAACACCTGGGCTTAAGAAATCTAGTATTTCA
TGCTGGGAATGAGACATAGGCCATGAAAAAAATGATCCCCAAGTGTGAACAAAAGATGCTCTTC
TGTGGACCACTGCATGAGCTTTTATACTACCGACCTGGTTTTTAAATAGAGTTTGCTATTAGAG
CATTGAATTGGAGAGAAGGCCTCCCTAGCCAGCACTTGTATATACGCATCTATAAATTGTCCGT
GTTCATACATTTGAGGGGAAAACACCATAAGGTTTCGTTTCTGTATACAACCCTGGCATTATGT
CCACTGTGTATAGAAGTAGATTAAGAGCCATATAAGTTTGAAGGAAACAGTTAATACCATTTTT
TAAGGAAACAATATAACCACAAAGCACAGTTTGAACAAAATCTCCTCTTTTAGCTGATGAACTT
ATTCTGTAGATTCTGTGGAACAAGCCTATCAGCTTCAGAATGGCATTGTACTCAATGGATTTGA
TGCTGTTTGACAAAGTTACTGATTCACTGCATGGCTCCCACAGGAGTGGGAAAACACTGCCATC
TTAGTTTGGATTCTTATGTAGCAGGAAATAAAGTATAGGTTTAGCCTCCTTCGCAGGCATGTCC
TGGACACCGGGCCAGTATCTATATATGTGTATGTACGTTTGTATGTGTGTAGACAAATATTTGG
AGGGGTATTTTTGCCCTGAGTCCAAGAGGGTCCTTTAGTACCTGAAAAGTAACTTGGCTTTCAT
TATTAGTACTGCTCTTGTTTCTTTTCACATAGCTGTCTAGAGTAGCTTACCAGAAGCTTCCATA
GTGGTGCAGAGGAAGTGGAAGGCATCAGTCCCTATGTATTTGCAGTTCACCTGCACTTAAGGCA
CTCTGTTATTTAGACTCATCTTACTGTACCTGTTCCTTAGACCTTCCATAATGCTACTGTCTCA
CTGAAACATTTAAATTTTACCCTTTAGACTGTAGCCTGGATATTATTCTTGTAGTTTACCTCTT
TAAAAACAAAACAAAACAAAACAAAAAACTCCCCTTCCTCACTGCCCAATATAAAAGGCAAATG
TGTACATGGCAGAGTTTGTGTGTTGTCTTGAAAGATTCAGGTATGTTGCCTTTATGGTTTCCCC
CTTCTACATTTCTTAGACTACATTTAGAGAACTGTGGCCGTTATCTGGAAGTAACCATTTGCAC
TGGAGTTCTATGCTCTCGCACCTTTCCAAAGTTAACAGATTTTGGGGTTGTGTTGTCACCCAAG
AGATTGTTGTTTGCCATACTTTGTCTGAAAAATTCCTTTGTGTTTCTATTGACTTCAATGATAG
TAAGAAAAGTGGTTGTTAGTTATAGATGTCTAGGTACTTCAGGGGCACTTCATTGAGAGTTTTG
TCTTGGATATTCTTGAAAGTTTATATTTTTATAATTTTTTCTTACATCAGATGTTTCTTTGCAG
TGGCTTAATGTTTGAAATTATTTTGTGGCTTTTTTTGTAAATATTGAAATGTAGCAATAATGTC
TTTTGAATATTCCCAAGCCCATGAGTCCTTGAAAATATTTTTTATATATACAGTAACTTTATGT
GTAAATACATAAGCGGCGTAAGTTTAAAGGATGTTGGTGTTCCACGTGTTTTATTCCTGTATGT
TGTCCAATTGTTGACAGTTCTGAAGAATTCTAATAAAATGTACATATATAAATCAAAAAAAAAA
AAAAAA

[0401] The term “linker”, as used herein, refers to a molecule that links two moieties. In one embodiment, the term “linker” refers to a covalent linker (e.g., covalent bond) or a non-covalent linker.

[0402] “Makassar” or “Hb G-Makassar” refers to a human β-hemoglobin variant, the human Hemoglobin (Hb) of G-Makassar variant or mutation (HB Makassar variant), which is an asymptomatic, naturally occurring variant (E6A) hemoglobin. Hb G-Makassar was first identified in Indonesia. (Mohamad, A. S. et al., 2018, Hematol. Rep., 10 (3): 7210 (doi: 10.4081/hr.2018.7210). The Hb G-Makassar mobility is slower when subjected to electrophoresis. The Makassar β-hemoglobin variant has its anatomical abnormality at the β-6 or A3 location where the glutamyl residue typically is replaced by an alanyl residue. The substitution of single amino acid in the gene encoding the β-globin subunit β-6 glutamyl to valine will result as sickle cell disease. Routine procedures, such as isoelectric focusing, hemoglobin electrophoresis separation by cation-exchange High Performance Liquid Chromatography (HPLC) and cellulose acetate electrophoresis, have been unable to separate the Hb G-Makassar and HbS globin forms, as they were found to have identical properties when analyzed by these methods. Consequently, Hb G-Makassar and HbS have been incorrectly identified and mistaken for each other by those skilled in the art, thus leading to misdiagnosis of Sickle Cell Disease (SCD). In one embodiment, the valine at amino acid position 6, which causes sickle cell disease, is replaced with an alanine, to thereby generate an Hb variant (Hb Makassar) that does not generate a sickle cell phenotype. In some embodiments, a Val→Ala (GTG→GCG) replacement (i.e., the Hb Makassar variant) can be generated using an A·T to G·C base editor (ABE).

[0403] Thus, the present disclosure includes compositions and methods for base editing a thymidine (T) to a cytidine (C) in the codon of the sixth amino acid of a sickle cell disease variant of the β-globin protein (Sickle HbS; E6V), thereby substituting an alanine for a valine (V6A) at this amino acid position. Substitution of alanine for valine at position 6 of HbS generates a β-globin protein variant that does not have a sickle cell phenotype (e.g., does not have the potential to polymerize as in the case of the pathogenic variant HbS). Accordingly, the compositions and methods of the disclosure are useful for the treatment of sickle cell disease (SCD).

[0404] By “marker” is meant any protein or polynucleotide having an alteration in expression, level, structure, or activity that is associated with a disease or disorder. In some cases, the disease or disorder is sickle cell disease. Non-limiting examples of markers include a Makassar variant of beta globin, beta globin, fetal hemoglobin, CD117, and variants of CD117 provided herein.

[0405] The term “mutation,” as used herein, refers to a substitution of a residue within a sequence, e.g., a nucleic acid or amino acid sequence, with another residue, or a deletion or insertion of one or more residues within a sequence. Mutations are typically described herein by identifying the original residue followed by the position of the residue within the sequence and by the identity of the newly substituted residue. Various methods for making the amino acid substitutions (mutations) provided herein are well known in the art, and are provided by, for example, Green and Sambrook, Molecular Cloning: A Laboratory Manual (4^{th} ed., Cold Spring Harbor Laboratory Press, Cold Spring Harbor, N.Y. (2012)).

[0406] The terms “nucleic acid” and “nucleic acid molecule,” as used herein, refer to a compound comprising a nucleobase and an acidic moiety, e.g., a nucleoside, a nucleotide, or a polymer of nucleotides. Typically, polymeric nucleic acids, e.g., nucleic acid molecules comprising three or more nucleotides are linear molecules, in which adjacent nucleotides are linked to each other via a phosphodiester linkage. In some embodiments, “nucleic acid” refers to individual nucleic acid residues (e.g., nucleotides and/or nucleosides). In some embodiments, “nucleic acid” refers to an oligonucleotide chain comprising three or more individual nucleotide residues. As used herein, the terms “oligonucleotide” and “polynucleotide” can be used interchangeably to refer to a polymer of nucleotides (e.g., a string of at least three nucleotides). In some embodiments, “nucleic acid” encompasses RNA as well as single and/or double-stranded DNA. Nucleic acids may be naturally occurring, for example, in the context of a genome, a transcript, an mRNA, tRNA, IRNA, siRNA, snRNA, a plasmid, cosmid, chromosome, chromatid, or other naturally occurring nucleic acid molecule. On the other hand, a nucleic acid molecule may be a non-naturally occurring molecule, e.g., a recombinant DNA or RNA, an artificial chromosome, an engineered genome, or fragment thereof, or a synthetic DNA, RNA, DNA/RNA hybrid, or including non-naturally occurring nucleotides or nucleosides. Furthermore, the terms “nucleic acid,” “DNA,” “RNA,” and/or similar terms include nucleic acid analogs, e.g., analogs having other than a phosphodiester backbone. Nucleic acids can be purified from natural sources, produced using recombinant expression systems and optionally purified, chemically synthesized, etc. Where appropriate, e.g., in the case of chemically synthesized molecules, nucleic acids comprise nucleoside analogs such as analogs having chemically modified bases or sugars, and backbone modifications. A nucleic acid sequence is presented in the 5′ to 3′ direction unless otherwise indicated. In some embodiments, a nucleic acid is or comprises natural nucleosides (e.g. adenosine, thymidine, guanosine, cytidine, uridine, deoxyadenosine, deoxythymidine, deoxyguanosine, and deoxycytidine); nucleoside analogs (e.g., 2-aminoadenosine, 2-thiothymidine, inosine, pyrrolo-pyrimidine, 3-methyl adenosine, 5-methylcytidine, 2-aminoadenosine, C5-bromouridine, C5-fluorouridine, C5-iodouridine, C5-propynyl-uridine, C5-propynyl-cytidine, C5-methylcytidine, 2-aminoadenosine, 7-deazaadenosine, 7-deazaguanosine, 8-oxoadenosine, 8-oxoguanosine, O (6)-methylguanine, and 2-thiocytidine); chemically modified bases; biologically modified bases (e.g., methylated bases); intercalated bases; modified sugars (e.g., 2′-fluororibose, ribose, 2′-deoxyribose, arabinose, and hexose); and/or modified phosphate groups (e.g., phosphorothioates and 5′-N-phosphoramidite linkages).

[0407] The term “nuclear localization sequence,” “nuclear localization signal,” or “NLS” refers to an amino acid sequence that promotes import of a protein into the cell nucleus. Nuclear localization sequences are known in the art and described, for example, in Plank et al., International PCT application, PCT/EP2000/011690, filed Nov. 23, 2000, published as WO/2001/038547 on May 31, 2001, the contents of which are incorporated herein by reference for their disclosure of exemplary nuclear localization sequences. In other embodiments, the NLS is an optimized NLS described, for example, by Koblan et al., Nature Biotech. 2018 doi: 10.1038/nbt.4172. In some embodiments, an NLS comprises the amino acid sequence

(SEQ ID NO: 190)
KRTADGSEFESPKKKRKV,
(SEQ ID NO: 191)
KRPAATKKAGQAKKKK,
(SEQ ID NO: 192)
KKTELQTTNAENKTKKL,
(SEQ ID NO: 193)
KRGINDRNFWRGENGRKTR,
(SEQ ID NO: 194)
RKSGKIAAIVVKRPRK,
(SEQ ID NO: 195)
PKKKRKV,
(SEQ ID NO: 196)
MDSLLMNRRKFLYQFKNVRWAKGRRETYLC,
(SEQ ID NO: 328)
PKKKRKVEGADKRTADGSEFESPKKKRKV,
(SEQ ID NO: 329)
RKSGKIAAIVVKRPRKPKKKRKV,
or
(SEQ ID NO: 196)
MDSLLMNRRKFLYQFKNVRWAKGRRETYLC.

[0408] The term “nucleobase,” “nitrogenous base,” or “base,” used interchangeably herein, refers to a nitrogen-containing biological compound that forms a nucleoside, which in turn is a component of a nucleotide. The ability of nucleobases to form base pairs and to stack one upon another leads directly to long-chain helical structures such as ribonucleic acid (RNA) and deoxyribonucleic acid (DNA). Five nucleobases—adenine (A), cytosine (C), guanine (G), thymine (T), and uracil (U)—are called primary or canonical. Adenine and guanine are derived from purine, and cytosine, uracil, and thymine are derived from pyrimidine. DNA and RNA can also contain other (non-primary) bases that are modified. Non-limiting exemplary modified nucleobases can include hypoxanthine, xanthine, 7-methylguanine, 5,6-dihydrouracil, 5-methylcytosine (m5C), and 5-hydromethylcytosine. Hypoxanthine and xanthine can be created through mutagen presence, both of them through deamination (replacement of the amine group with a carbonyl group). Hypoxanthine can be modified from adenine. Xanthine can be modified from guanine. Uracil can result from deamination of cytosine. A “nucleoside” consists of a nucleobase and a five carbon sugar (either ribose or deoxyribose). Examples of a nucleoside include adenosine, guanosine, uridine, cytidine, 5-methyluridine (m5U), deoxyadenosine, deoxyguanosine, thymidine, deoxyuridine, and deoxycytidine. Examples of a nucleoside with a modified nucleobase includes inosine (I), xanthosine (X), 7-methylguanosine (m7G), dihydrouridine (D), 5-methylcytidine (m5C), and pseudouridine (Ψ). A “nucleotide” consists of a nucleobase, a five carbon sugar (either ribose or deoxyribose), and at least one phosphate group. Non-limiting examples of modified nucleobases and/or chemical modifications that a modified nucleobase may include are the following: pseudo-uridine, 5-Methyl-cytosine, 2′-O-methyl-3′-phosphonoacetate, 2′-O-methyl thioPACE (MSP), 2′-O-methyl-PACE (MP), 2′-fluoro RNA (2′-F-RNA), constrained ethyl (S-cEt), 2′-O-methyl (‘M’), 2′-O-methyl-3′-phosphorothioate (‘MS’), 2′-O-methyl-3′-thiophosphonoacetate (‘MSP’), 5-methoxyuridine, phosphorothioate, and N1-Methylpseudouridine.

[0409] The term “nucleic acid programmable DNA binding protein” or “napDNAbp” may be used interchangeably with “polynucleotide programmable nucleotide binding domain” to refer to a protein that associates with a nucleic acid (e.g., DNA or RNA), such as a guide nucleic acid or guide polynucleotide (e.g., gRNA), that guides the napDNAbp to a specific nucleic acid sequence. In some embodiments, the polynucleotide programmable nucleotide binding domain is a polynucleotide programmable DNA binding domain. In some embodiments, the polynucleotide programmable nucleotide binding domain is a polynucleotide programmable RNA binding domain. In some embodiments, the polynucleotide programmable nucleotide binding domain is a Cas9 protein. A Cas9 protein can associate with a guide RNA that guides the Cas9 protein to a specific DNA sequence that is complementary to the guide RNA. In some embodiments, the napDNAbp is a Cas9 domain, for example a nuclease active Cas9, a Cas9 nickase (nCas9), or a nuclease inactive Cas9 (dCas9). Non-limiting examples of nucleic acid programmable DNA binding proteins include, Cas9 (e.g., dCas9 and nCas9), Cas12a/Cpf1, Cas12b/C2c1, Cas12c/C2c3, Cas12d/CasY, Cas12e/CasX, Cas12g, Cas12h, Cas12i, and Cas12j/CasΦ (Cas12j/Casphi). Non-limiting examples of Cas enzymes include Cas1, Cas1B, Cas2, Cas3, Cas4, Cas5, Cas5d, Cas5t, Cas5h, Cas5a, Cas6, Cas7, Cas8, Cas8a, Cas8b, Cas8c, Cas9 (also known as Csn1 or Csx12), Cas10, Cas10d, Cas12a/Cpf1, Cas12b/C2c1, Cas12c/C2c3, Cas12d/CasY, Cas12e/CasX, Cas12g, Cas12h, Cas12i, Cas12j/CasΦ, Cpf1, Csy1, Csy2, Csy3, Csy4, Cse1, Cse2, Cse3, Cse4, Cse5e, Csc1, Csc2, Csa5, Csn1, Csn2, Csm1, Csm2, Csm3, Csm4, Csm5, Csm6, Cmr1, Cmr3, Cmr4, Cmr5, Cmr6, Csb1, Csb2, Csb3, Csx17, Csx14, Csx10, Csx16, CsaX, Csx3, Csx1, CsxIS, Csx11, Csf1, Csf2, CsO, Csf4, Csd1, Csd2, Cst1, Cst2, Csh1, Csh2, Csa1, Csa2, Csa3, Csa4, Csa5, Type II Cas effector proteins, Type V Cas effector proteins, Type VI Cas effector proteins, CARF, DinG, homologues thereof, or modified or engineered versions thereof. Other nucleic acid programmable DNA binding proteins are also within the scope of this disclosure, although they may not be specifically listed in this disclosure. See, e.g., Makarova et al. “Classification and Nomenclature of CRISPR-Cas Systems: Where from Here?” CRISPR J. 2018 October; 1:325-336. doi: 10.1089/crispr.2018.0033; Yan et al., “Functionally diverse type V CRISPR-Cas systems” Science. 2019 Jan. 4; 363 (6422): 88-91. doi: 10.1126/science.aav7271, the entire contents of each are hereby incorporated by reference. Exemplary nucleic acid programmable DNA binding proteins and nucleic acid sequences encoding nucleic acid programmable DNA binding proteins are provided in the Sequence Listing as SEQ ID NOs: 197-230, and 378.

[0410] The terms “nucleobase editing domain” or “nucleobase editing protein,” as used herein, refers to a protein or enzyme that can catalyze a nucleobase modification in RNA or DNA, such as cytosine (or cytidine) to uracil (or uridine) or thymine (or thymidine), and adenine (or adenosine) to hypoxanthine (or inosine) deaminations, as well as non-templated nucleotide additions and insertions. In some embodiments, the nucleobase editing domain is a deaminase domain (e.g., an adenine deaminase or an adenosine deaminase).

[0411] As used herein, “obtaining” as in “obtaining an agent” includes synthesizing, purchasing, or otherwise acquiring the agent.

[0412] By “Stem Cell Factor (SCF) polypeptide” is meant a polypeptide having at least about 85% amino acid sequence identity to an amino acid sequence provided at NCBI Ref. Seq. Accession No. NP_000890, reproduced below, or a fragment thereof that functions in hematopoiesis. In some embodiments, a SCF polypeptide or fragment thereof binds CD117.

>NP_000890.1 kit ligand isoform b precursor [Homo
sapiens]
(SEQ ID NO: 501)
MKKTQTWILTCIYLQLLLFNPLVKTEGICRNRVTNNVKDVTKLVANLPKD
YMITLKYVPGMDVLPSHCWISEMVVQLSDSLTDLLDKFSNISEGLSNYSI
IDKLVNIVDDLVECVKENSSKDLKKSFKSPEPRLFTPEEFFRIFNRSIDA
FKDFVVASETSDCVVSSTLSPEKDSRVSVTKPFMLPPVAASSLRNDSSSS
NRKAKNPPGDSSLHWAAMALPALFSLIIGFAFGALYWKKROPSLTRAVEN
IQINEEDNEISMLQEKEREFQEV.

[0413] By “stem cell factor (SCF) polynucleotide” is meant a nucleic acid molecule that encodes an SCF polypeptide as well as the introns, exons, 3′ untranslated regions, 5′ untranslated regions, and regulatory sequences associated with its expression, or fragments thereof. In embodiments, an SCF polynucleotide is the genomic sequence, cDNA, mRNA, or gene associated with and/or required for SCF expression. An exemplary SCF polynucleotide sequence from Homo sapiens is provided below (NCBI Ref. Seq. Accession No. NM_003994.5).

>NM_003994.5 Homo sapiens KIT ligand (KITLG), transcript variant
a, mRNA
(SEQ ID NO: 502)
GGGCTTCGCTCGCCGCCTCGCGCCGAGACTAGAAGCGCTGCGGGAAGCAGGGACAGTGGAGAGG
GCGCTGCGCTCGGGCTACCCAATGCGTGGACTATCTGCCGCCGCTGTTCGTGCAATATGCTGGA
GCTCCAGAACAGCTAAACGGAGTCGCCACACCACTGTTTGTGCTGGATCGCAGCGCTGCCTTTC
CTTATGAAGAAGACACAAACTTGGATTCTCACTTGCATTTATCTTCAGCTGCTCCTATTTAATC
CTCTCGTCAAAACTGAAGGGATCTGCAGGAATCGTGTGACTAATAATGTAAAAGACGTCACTAA
ATTGGTGGCAAATCTTCCAAAAGACTACATGATAACCCTCAAATATGTCCCCGGGATGGATGTT
TTGCCAAGTCATTGTTGGATAAGCGAGATGGTAGTACAATTGTCAGACAGCTTGACTGATCTTC
TGGACAAGTTTTCAAATATTTCTGAAGGCTTGAGTAATTATTCCATCATAGACAAACTTGTGAA
TATAGTGGATGACCTTGTGGAGTGCGTGAAAGAAAACTCATCTAAGGATCTAAAAAAATCATTC
AAGAGCCCAGAACCCAGGCTCTTTACTCCTGAAGAATTCTTTAGAATTTTTAATAGATCCATTG
ATGCCTTCAAGGACTTTGTAGTGGCATCTGAAACTAGTGATTGTGTGGTTTCTTCAACATTAAG
TCCTGAGAAAGGGAAGGCCAAAAATCCCCCTGGAGACTCCAGCCTACACTGGGCAGCCATGGCA
TTGCCAGCATTGTTTTCTCTTATAATTGGCTTTGCTTTTGGAGCCTTATACTGGAAGAAGAGAC
AGCCAAGTCTTACAAGGGCAGTTGAAAATATACAAATTAATGAAGAGGATAATGAGATAAGTAT
GTTGCAAGAGAAAGAGAGAGAGTTTCAAGAAGTGTAATTGTGGCTTGTATCAACACTGTTACTT
TCGTACATTGGCTGGTAACAGTTCATGTTTGCTTCATAAATGAAGCAGCTTTAAACAAATTCAT
ATTCTGTCTGGAGTGACAGACCACATCTTTATCTGTTCTTGCTACCCATGACTTTATATGGATG
ATTCAGAAATTGGAACAGAATGTTTTACTGTGAAACTGGCACTGAATTAATCATCTATAAAGAA
GAACTTGCATGGAGCAGGACTCTATTTTAAGGACTGCGGGACTTGGGTCTCATTTAGAACTTGC
AGCTGATGTTGGAAGAGAAAGCACGTGTCTCAGACTGCATGTACCATTTGCATGGCTCCAGAAA
TGTCTAAATGCTGAAAAAACACCTAGCTTTATTCTTCAGATACAAACTGCAGCCTGTAGTTATC
CTGGTCTCTGCAAGTAGATTTCAGCTTGGATAGTGAGGGTAACAATTTTTCTCAAAGGGATCTG
GAAAAAATGTTTAAAACTCAGTAGTGTCAGCCACTGTACAGTGTAGAAAGCAGTGGGAACTGTG
ATTGGATTTGGCAACATGTCAGCTTTATAGTTGCCGATTAGTGATATGGGTCTGATTTCGATCT
CTTCCTGATGTAAACCATGCTCACCCATATCCCACTATACAAATGCAAATGGTTGCCTGGTTCC
ATTTATGCAAGGGAGCCAGTACTGAATTATGCCTTGGCAGAGGGGAGACTCCAAAAGAGTCATC
GCAGGAAGAAGTTAAGAACACTGAACATCAGAACAGTCTGCCAAGAAGGACATTGGCATCCTGG
GAAAGTCCGCCTTTTCCCTTGACCACTATAGGGTGTATAAATCGTGTTTGCAAAATGTGTTATG
ATGTGTTTATATTCTAAAACTATTACAGAGCTATGTAAAGGGACTTAGGAGAAAATGCTGAATG
TAAGATGGTCCCATTTCAATTTCCACCATGGGAGAGCCTAAAAATAAATTATGACATTTAGTAT
CTAAGGTTAGAAAACCACGCCCACATGCTAATATGGGTGTTGAAAACTAGGTTACTTATAATGC
AAGGAATCAGGAAACTTTAGTTATTTATAGTATAATCACCATTATCTGTTTAAAGGATCCATTT
AGTTAAAATCGGGCACTCTATATTCATTAAGGTTTATGAATTAAAAAGAAAGCTTTATGTAGTT
ATGCATGTCAGTTTGCTATTTAAAATGTGTGACAGTGTTTGTCATATTAAGAGTGAATTTGGCA
GGAATTCCCAAGATGGACATTGTGCTTTTAAACTAGAACTTGTAAGACATTATGTGAATATCCC
TTGCCAATTTTTTTTATAATAAGAAAACATCTGACTAAAGTCAAAGAATGATTTCTTATGGTTT
ATTTTGATGAAAGTTCTTTTAACATGTCTTGAATGTACACATAAAGGAATCCAAAGCTTTCCAT
TCTAACTTAATCTTTGTGATAACATTATTGCCATGTTCTACAACCGTAAGATGACAGTTTTCAA
TGTAGTGACACAAAAGGGCATGAAAAACTAACTGCTAGCTTTCCTTTCATTTCAAAAGTCCAAG
AATTTCTAGTATATTTGGATTTTAGCTTCTGTTCAAAGCAAATCCAGATGCAACTCCAGTAAGT
GGCCTTTGCTCTTTTTTGTACCAAAGAGCCCAGATGATTCCTACAGTCCCTTTCTTCTCTAACA
TGCTGTGGTTCCTTAAATATGAGTAATTTCTCTAAGATATAACCCAGGTGCTTTGAGAAGCTGC
ATTAAGGTGTTCAGGCCCTCAGATATCACATGGTACACTTGATTAGTAATAAAACCAGAGATCA
ATTTAAATTGCTGATAGGTCCTGTCTCAGTGTGTGGCATTGACTGTTTTCAGGAAAATAGATAC
AGATTAATATGAGTTATGCGTGTAGGTTGTGTATAGATTGAGAAGATAGATACTTCTCAATCTA
GTAGTTTGATTTATTTAACCAATGGTTTCAGTTTGCTTGAGCATATGAAAATCCTGCTTAATGT
GCTTAAGAGTATAATAAATGTGTACTTTTGTCCTCAAACCTAGTAGCTGGGTTTTAACACTCAT
GGACATGGTCTTAATCAATGGAGTTAAATAAACAAATTCAGCAAGTTATTAAATCTGACATGGT
AGGAGAGGGGAGATGTGTCCTGCTTATTAAATGTGTTGGTCCATTGAAAGTTACATGGATTGCC
AATTTTTAAAACACTAAAGTTGAATAAAATGCATGAACAATAGAAAAATGCTGAACATTATTTT
GGATGCTAGCTGCTTGGACATTAACTGTGTTATTTCTGCTTTGAGATGAAAATATATATTTATC
TTTGCTTATTTTATCCCAGATGTGTTCTGAATATCCTTCTTCATAAATCATGGAAAACTCACTG
CTGAGATAGTAAACCATGAAATCGCCTTTTCAGTTGGTGCCATGTATCTGACAGTTCCATCTTG
GAAGGTTTCAAAATTACCTTTTAAAATGATCTCAGAAGTCTGTAGATTCTCAATGATACTGAAA
GCTTTGCACCTCTTTGGTAGAAACCAGGTCTATTTAGAAAATGGCTTTATGATAAATGTTGCCT
CCTGAGTGATAATGAAGTGTTCCTGGATATTGTATTGTAATTTAATGTGCTTACCACACTGCCA
CATTTTAATGAGTCAGAGAAAAATTAATTTTTCTTCAATACAATAATAGAACAAGTAGCCTATT
CTCTTAAAAAGTATGTGAAAAGAAAATTATGAAAAAATATGCATACCTAATGAAGTATTGGTTT
TAGTAAGAATTAAATACATTTCATTGAGCTTTAAAGTACTTTGGAGAAACTTTGGGGCACGTTT
TCCTACTCTAATTCAACTAAAGTTATAAATAAAGAGAAAAACTCATTCAGAAATCATGGATTTT
AAAAATATTTTACTGCAGCCAAGTTTTCATTTCAAAATGTAATTTCAGTTTGGAGCTTTTAGGC
ATTATGTATATTTAAAAAATATATTCTTCAAAAATGCATTTTGGCATGGTGGGATGGATGTTGC
AAAAGATATCCGGAGCCTCCAGTCTGTCATTAACTGATATGGTAAATCACCTCTCTTCTTTGGG
TCTCAATTTTTTATTTATCTATATGGTAAACTCAGAGATCACTCCTTAGGGGTGAGTCCTATTG
CAATATGACCGACAAAGAAGACAAAATAGCATTGAAACTAACCCATACAAAATATCCAACTCTG
GATTCTGTGAATAAGTATCTTGACCATAAAAAGTCATTGCTGTTCTTGTTTCTAATGTAAATAG
TGTCCATTAGTAAAAGTGAAATTCAGTCTTAAGTAGGGTGAATTGGATCACCATTTACACAAGA
GATGGCTTTTTCCTTTGCTTGAATAAACATTTTGGATCACCTCCAAAGAATGAAAACCAGTAGT
ACGTTTTAGTCATATTAGTCAGGATGAGAAACTATAAGATGTGTGTAACATTTGGAAATGCACC
AAAGTGAGCGTTTAAATCTTCTCATTTTATTGAAAACTAAGAGCAGAAAATGTAAAATGCTCAT
GAAGGTTTTGAATGCCAAAAGATATTTTAGAATCAATTTATAAAGGGGTAATTCATTAATTACA
CTTTAAAATTGGAAAGTGGGATAAGAAATCTAAAGTAAACCAGCTTATCTTTGAAACAATATTA
TTTTGAAATTGGCTTTAAAATAAAACCATTCAGATTGAAATTCTAATTAGCTCATTTGTGGAGT
TTGATCACACAATTCATAATGTTGCTGCTTTCCATTAACTAGTCTTGAAATGCCTTTGTTTGTA
AAAATAAAATAATGGTACTTTCATTTTATAACAAGGTGTTTTTTTCAAGAAATAATCCATGCTA
AAATGGATATTTGTGATCCTGAAATGTTTACTAAGCATTGTAAATTTATTTATAACTGCCATCT
CCAACTACATCCTTATGATGTTTTTAACAATAAAATTAAAACAACTGTTAAACTAAAAACCACA
CCGTTTTCCAGTACTTGATCTCTGAGCTACAATACTCACTAAATATAATTTTCCAATCAAAATA
TTCTATTCTATATTCTAAGGGTTAATATGTGATTATAGTGTCCACTTGCCACCATTTTTTTAAA
TCAATGGACTTGAAAAGTATTAATTTAGATGGATGCGCAGATATACCCTCAGTTCAGTCATAGA
TTGGAGTTTGCATATAATAATGTAAATGTATGTCGACACTATTCTAAATAGTTCTATTATGACT
GAAATTTAATTAAATAAAAAAGGTTGTAAAATGTGATGTGTATGTGTATATACTGTATGTGTAC
TTTTTAAAATAGGTGTATGTCCCAACCCTTTTTTATACAGGTTTGAATTTAAAATTACATGATA
TATACATATACTTTATTGTTCTAAATAAAGAATTTTATGCACTCTCAAAAAAAAAAAAAAAAAA.

[0414] By “subject” or “patient” is meant a mammal. Non-limiting examples of mammals include a primate (e.g., a human or a cynomolgus monkey) or non-human mammal. In embodiments, the mammal is a bovine, equine, canine, ovine, rabbit, rodent, nonhuman primate, or feline. In an embodiment, “patient” refers to a mammalian subject with a higher than average likelihood of developing a disease or a disorder. Exemplary patients can be humans, non-human primates (e.g., a cynomolgus monkey), cats, dogs, pigs, cattle, cats, horses, camels, llamas, goats, sheep, rodents (e.g., mice, rabbits, rats, or guinea pigs) and other mammalians that can benefit from the therapies disclosed herein. Exemplary human patients can be male and/or female.

[0415] “Patient in need thereof” or “subject in need thereof” is referred to herein as a patient diagnosed with, at risk or having, predetermined to have, or suspected of having a disease or disorder.

[0416] The terms “pathogenic mutation”, “pathogenic variant”, “disease causing mutation”, “disease causing variant”, “deleterious mutation”, or “predisposing mutation” refers to a genetic alteration or mutation that is associated with a disease or disorder or that increases an individual's susceptibility or predisposition to a certain disease or disorder. In some embodiments, the pathogenic mutation comprises at least one wild type amino acid substituted by at least one pathogenic amino acid in a protein encoded by a gene. In some embodiments, the pathogenic mutation is in a terminating region (e.g., stop codon). In some embodiments, the pathogenic mutation is in a non-coding region (e.g., intron, promoter, etc.).

[0417] The terms “protein”, “peptide”, “polypeptide”, and their grammatical equivalents are used interchangeably herein, and refer to a polymer of amino acid residues linked together by peptide (amide) bonds. A protein, peptide, or polypeptide can be naturally occurring, recombinant, or synthetic, or any combination thereof.

[0418] The term “fusion protein” as used herein refers to a hybrid polypeptide which comprises protein domains from at least two different proteins.

[0419] As used herein, the term “human antibody” refers to an antibody in which substantially every part of the protein (e.g., CDR, framework, C_{L}, C_{H} domains (e.g., C_{H1}, C_{H2}, C_{H3}), hinge, (V_{L}, V_{H})) is substantially non-immunogenic in humans, with only minor sequence changes or variations. A human antibody can be produced in a human cell (e.g., by recombinant expression), or by a non-human animal or a prokaryotic or eukaryotic cell (e.g., yeast) that is capable of expressing functionally rearranged human immunoglobulin (e.g., heavy chain and/or light chain) genes. Further, when a human antibody is a single-chain antibody, it can include a linker peptide that is not found in native human antibodies. For example, an Fv can comprise a linker peptide, such as two to about eight glycine or other amino acid residues, which connects the variable region of the heavy chain and the variable region of the light chain. Such linker peptides are considered to be of human origin. Human antibodies can be made by a variety of methods known in the art including phage display methods using antibody libraries derived from human immunoglobulin sequences. See U.S. Pat. Nos. 4,444,887 and 4,716,111; and PCT publications WO 1998/46645; WO 1998/50433; WO 1998/24893; WO 1998/16654; WO 1996/34096; WO 1996/33735; and WO 1991/10741; incorporated herein by reference. Human antibodies can also be produced using transgenic mice that are incapable of expressing functional endogenous immunoglobulins, but which can express human immunoglobulin genes. See, e.g., PCT publications WO 98/24893; WO 92/01047; WO 96/34096; WO 96/33735; U.S. Pat. Nos. 5,413,923; 5,625,126; 5,633,425; 5,569,825; 5,661,016; 5,545,806; 5,814,318; 5,885,793; 5,916,771; and 5,939,598; incorporated by reference herein.

[0420] As used herein, the term “humanized” antibodies refers to forms of non-human (e.g., murine) antibodies that are chimeric immunoglobulins, immunoglobulin chains or fragments thereof (such as Fv, Fab, Fab′, F(ab′)2 or other target-binding subdomains of antibodies) which contain minimal sequences derived from non-human immunoglobulin. In general, the humanized antibody will comprise substantially all of at least one, and typically two, variable regions, in which all or substantially all of the CDR regions correspond to those of a non-human immunoglobulin. All or substantially all of the FR regions may also be those of a human immunoglobulin sequence. The humanized antibody can also comprise at least a portion of an immunoglobulin constant region (Fc), typically that of a human immunoglobulin consensus sequence. Methods of antibody humanization are known in the art. See, e.g., Riechmann et al., Nature 332:323-7, 1988; U.S. Pat. Nos. 5,530,101; 5,585,089; 5,693,761; 5,693,762; and 6,180,370 to Queen et al; EP239400; PCT publication WO 91/09967; U.S. Pat. No. 5,225,539; EP592106; and EP519596; incorporated herein by reference.

[0421] The term “recombinant” as used herein in the context of proteins or nucleic acids refers to proteins or nucleic acids that do not occur in nature but are the product of human engineering. For example, in some embodiments, a recombinant protein or nucleic acid molecule comprises an amino acid or nucleotide sequence that comprises at least one, at least two, at least three, at least four, at least five, at least six, or at least seven mutations as compared to any naturally occurring sequence.

[0422] By “reduces” is meant a negative alteration of at least 10%, 25%, 50%, 75%, or 100%.

[0423] By “reference” is meant a standard or control condition. In one embodiment, the reference is a wild type or healthy cell. In other embodiments and without limitation, a reference is an untreated cell that is not subjected to a test condition, or is subjected to placebo or normal saline, medium, buffer, and/or a control vector that does not harbor a polynucleotide of interest. In some cases, a “reference” is a n untreated subject, such as a subject not administered a hematopoietic stem cell edited according to the methods of the present disclosure. In some cases, the subject is a healthy subject (e.g., a subject not having sickle cell disease). In some embodiments, the reference is an unedited or wild type cell, polypeptide, or polynucleotide.

[0424] A “reference sequence” is a defined sequence used as a basis for sequence comparison. A reference sequence may be a subset of or the entirety of a specified sequence; for example, a segment of a full-length cDNA or gene sequence, or the complete cDNA or gene sequence. For polypeptides, the length of the reference polypeptide sequence will generally be at least about 16 amino acids, at least about 20 amino acids, at least about 25 amino acids, about 35 amino acids, about 50 amino acids, or about 100 amino acids. For nucleic acids, the length of the reference nucleic acid sequence will generally be at least about 50 nucleotides, at least about 60 nucleotides, at least about 75 nucleotides, about 100 nucleotides or about 300 nucleotides or any integer thereabout or therebetween. In some embodiments, a reference sequence is a wild type sequence of a protein of interest. In other embodiments, a reference sequence is a polynucleotide sequence encoding a wild type protein.

[0425] The term “RNA-programmable nuclease,” and “RNA-guided nuclease” refer to a nuclease that forms a complex with (e.g., binds or associates with) one or more RNA(s) that is not a target for cleavage. In some embodiments, an RNA-programmable nuclease, when in a complex with an RNA, may be referred to as a nuclease: RNA complex. Typically, the bound RNA(s) is referred to as a guide RNA (gRNA). In some embodiments, the RNA-programmable nuclease is the (CRISPR-associated system) Cas9 endonuclease, for example, Cas9 (Csn1) from Streptococcus pyogenes (e.g., SEQ ID NO: 197), Cas9 from Neisseria meningitidis (NmeCas9; SEQ ID NO: 208), Nme2Cas9 (SEQ ID NO: 209), or derivatives thereof (e.g., a sequence with at least about 85% sequence identity to a Cas9, such as Nme2Cas9 or spCas9).

[0426] As used herein, the term “scFv” refers to a single chain Fv antibody in which the variable regions of the heavy chain and the light chain from an antibody have been joined to form one chain. scFv fragments contain a single polypeptide chain that includes the variable region of an antibody light chain (VL) (e.g., CDR-L1, CDR-L2, and/or CDR-L3) and the variable region of an antibody heavy chain (VH) (e.g., CDR-H1, CDR-H2, and/or CDR-H3) separated by a linker. The linker that joins the VL and VH regions of a scFv fragment can be a peptide linker composed of proteinogenic amino acids. Alternative linkers can be used to so as to increase the resistance of the scFv fragment to proteolytic degradation (for example, linkers containing D-amino acids), in order to enhance the solubility of the scFv fragment (for example, hydrophilic linkers such as polyethylene glycol-containing linkers or polypeptides containing repeating glycine and serine residues), to improve the biophysical stability of the molecule (for example, a linker containing cysteine residues that form intramolecular or intermolecular disulfide bonds), or to attenuate the immunogenicity of the scFv fragment (for example, linkers containing glycosylation sites). It will also be understood by one of ordinary skill in the art that the variable regions of the scFv molecules described herein can be modified such that they vary in amino acid sequence from the antibody molecule from which they were derived. For example, nucleotide or amino acid substitutions leading to conservative substitutions or changes at amino acid residues can be made (e.g., in CDR and/or framework residues) so as to preserve or enhance the ability of the scFv to bind to the antigen recognized by the corresponding antibody.

[0427] Amino acids generally can be grouped according to the following common side-chain properties:
[0428] (1) hydrophobic: Norleucine, Met, Ala, Val, Leu, He;
[0429] (2) neutral hydrophilic: Cys, Ser, Thr, Asn, Gin;
[0430] (3) acidic: Asp, Glu;
[0431] (4) basic: His, Lys, Arg;
[0432] (5) residues that influence chain orientation: Gly, Pro;
[0433] (6) aromatic: Trp, Tyr, Phe.

[0434] In some embodiments, conservative substitutions can involve the exchange of a member of one of these classes for another member of the same class. In some embodiments, non-conservative amino acid substitutions can involve exchanging a member of one of these classes for another class.

[0435] By “selectively binds” is meant specifically binds a wild type version of the cell surface protein but exhibits reduced binding or fails to detectably bind to the cell surface protein comprising a mutation. In embodiments, an antibody of the present disclosure selectively binds to a wild type CD117 polypeptide but exhibits reduced binding to a CD117 polypeptide comprising one or more amino acid alterations, such as those provided herein, relative to the wild type CD117 polypeptide. In embodiments, an antibody of the present disclosure binds a wild type CD117 polypeptide 1.1-fold, 1.2-fold, 1.3-fold, 1.4-fold, 1-fold, 5-fold, 1.75-fold, 2-fold, 3-fold, 4-fold, 5-fold, 6-fold, 7-fold, 8-fold, 9-fold, 10-fold, 100-fold, 1000-fold, 10000-fold, 100000-fold, or 1000000-fold more strongly (e.g., as quantified using KD(M), where a lower KD(M) indicates stronger binding) than to an altered CD117 polypeptide of the present disclosure.

[0436] By “specifically binds” is meant a nucleic acid molecule, polypeptide, polypeptide/polynucleotide complex, compound, or molecule that recognizes and binds a polypeptide and/or nucleic acid molecule of the disclosure, but which does not substantially recognize and bind other molecules in a sample, for example, a biological sample.

[0437] By “substantially identical” is meant a polypeptide or nucleic acid molecule exhibiting at least 50% identity to a reference amino acid sequence. In one embodiment, a reference sequence is a wild type amino acid or nucleic acid sequence. In another embodiment, a reference sequence is any one of the amino acid or nucleic acid sequences described herein. In one embodiment, such a sequence is at least about 60%, 80%, 85%, 90%, 95%, 96%, 97%, 98%, 99%, 99.9%, or even 99.99%, identical at the amino acid level or nucleic acid level to the sequence used for comparison.

[0438] Nucleic acid molecules useful in the methods of the disclosure include any nucleic acid molecule that encodes a polypeptide of the disclosure or a functional fragment thereof. Such nucleic acid molecules need not be 100% identical with an endogenous nucleic acid sequence but will typically exhibit substantial identity. Polynucleotides having “substantial identity” to an endogenous sequence are typically capable of hybridizing with at least one strand of a double-stranded nucleic acid molecule. Nucleic acid molecules useful in the methods of the disclosure include any nucleic acid molecule that encodes a polypeptide of the disclosure or a functional fragment thereof. Such nucleic acid molecules need not be 100% identical with an endogenous nucleic acid sequence but will typically exhibit substantial identity. Polynucleotides having “substantial identity” to an endogenous sequence are typically capable of hybridizing with at least one strand of a double-stranded nucleic acid molecule. By “hybridize” is meant pair to form a double-stranded molecule between complementary polynucleotide sequences (e.g., a gene described herein), or portions thereof, under various conditions of stringency. (See, e.g., Wahl, G. M. and S. L. Berger (1987) Methods Enzymol. 152:399; Kimmel, A. R. (1987) Methods Enzymol. 152:507).

[0439] By “split” is meant divided into two or more fragments.

[0440] A “split polypeptide” or “split protein” refers to a protein that is provided as an N-terminal fragment and a C-terminal fragment translated as two separate polypeptides from a nucleotide sequence(s). The polypeptides corresponding to the N-terminal portion and the C-terminal portion of the split protein may be spliced in some embodiments to form a “reconstituted” protein. In embodiments, the split polypeptide is a nucleic acid programmable DNA binding protein (e.g., a Cas9) or a base editor.

[0441] The term “target site” refers to a sequence within a nucleic acid molecule that is modified. In embodiments, the modification is deamination of a base. The deaminase can be an adenine deaminase. The fusion protein or base editing complex comprising a deaminase may comprise a dCas9-adenosine deaminase fusion protein, a Cas12b-adenosine deaminase fusion, or a base editor disclosed herein.

[0442] As used herein, the terms “treat,” treating,” “treatment,” and the like refer to reducing or ameliorating a disorder and/or symptoms associated therewith or obtaining a desired pharmacologic and/or physiologic effect. It will be appreciated that, although not precluded, treating a disorder or condition does not require that the disorder, condition or symptoms associated therewith be completely eliminated. In some embodiments, the effect is therapeutic, i.e., without limitation, the effect partially or completely reduces, diminishes, abrogates, abates, alleviates, decreases the intensity of, or cures a disease and/or adverse symptom attributable to the disease. In some embodiments, the effect is preventative, i.e., the effect protects or prevents an occurrence or reoccurrence of a disease or condition. To this end, the presently disclosed methods comprise administering a therapeutically effective amount of a compositions as described herein.

[0443] By “uracil glycosylase inhibitor” or “UGI” is meant an agent that inhibits the uracil-excision repair system. Base editors comprising a cytidine deaminase convert cytosine to uracil, which is then converted to thymine through DNA replication or repair. In various embodiments, a uracil DNA glycosylase (UGI) prevent base excision repair which changes the U back to a C. In some instances, contacting a cell and/or polynucleotide with a UGI and a base editor prevents base excision repair which changes the U back to a C. An exemplary UGI comprises an amino acid sequence as follows:

>splP14739IUNGI_BPPB2 Uracil-DNA glycosylase
inhibitor
(SEQ ID NO: 231)
MTNLSDIIEKETGKQLVIQESILMLPEEVEEVIGNKPESDILVHTAYDES
TDENVMLLTSDAPEYKPWALVIQDSNGENKIKML.

[0444] In some embodiments, the agent inhibiting the uracil-excision repair system is a uracil stabilizing protein (USP). See, e.g., WO 2022015969 A1, incorporated herein by reference.

[0445] Ranges provided herein are understood to be shorthand for all of the values within the range. For example, a range of 1 to 50 is understood to include any number, combination of numbers, or sub-range from the group consisting 1, 2, 3, 4, 5, 6, 7, 8, 9, 10, 11, 12, 13, 14, 15, 16, 17, 18, 19, 20, 21, 22, 23, 24, 25, 26, 27, 28, 29, 30, 31, 32, 33, 34, 35, 36, 37, 38, 39, 40, 41, 42, 43, 44, 45, 46, 47, 48, 49, or 50.

[0446] The term “transfecting” or “transfection” is used synonymously and according to some aspects and embodiments herein means the introduction of heterologous nucleic acid (DNA/RNA) into a eukaryotic cell, in particular yeast cells.

[0447] According to some aspects and embodiments herein, antibody fragments are understood as meaning functional parts of antibodies, such as Fc, Fab, Fab′, Fv, F(ab′)2, scFv. According to some aspects and embodiments herein, corresponding biologically active fragments are to be understood as meaning those parts of antibodies which are capable of binding to an antigen, such as Fab, Fab′, Fv, F(ab′)2, and scFv.

[0448] As used herein, the term “vector” refers to a means of introducing a nucleic acid sequence into a cell, resulting in a transformed cell. Vectors include plasmids, transposons, phages, viruses, liposomes, lipid nanoparticles, and episomes. “Expression vectors” are nucleic acid sequences comprising the nucleotide sequence to be expressed in the recipient cell. Expression vectors contain a polynucleotide sequence as well as additional nucleic acid sequences to promote and/or facilitate the expression of the introduced sequence, such as start, stop, enhancer, promoter, and secretion sequences, into the genome of a mammalian cell. Examples of vectors include nucleic acid vectors, e.g., DNA vectors, such as plasmids, RNA vectors, viruses or other suitable replicons (e.g., viral vectors). A variety of vectors have been developed for the delivery of polynucleotides encoding exogenous proteins into a prokaryotic or eukaryotic cell. Examples of such expression vectors are disclosed in, e.g., WO 1994/11026; incorporated herein by reference. Certain vectors that can be used for the expression of antibodies, antibody fragments, base editors, guide polynucleotides, and/or base editor systems of some aspects and embodiments herein include plasmids that contain regulatory sequences, such as promoter and enhancer regions, which direct gene transcription. Other useful vectors for expression of antibodies and antibody fragments contain polynucleotide sequences that enhance the rate of translation of these genes or improve the stability or nuclear export of the mRNA that results from gene transcription. These sequence elements include, e.g., 5′ and 3′ untranslated regions, an internal ribosomal entry site (IRES), and polyadenylation signal site in order to direct efficient transcription of the gene carried on the expression vector. The expression vectors of some aspects and embodiments herein may also contain a polynucleotide encoding a marker for selection of cells that contain such a vector. Examples of a suitable marker include genes that encode resistance to antibiotics, such as ampicillin, chloramphenicol, kanamycin, or nourseothricin.

[0449] As used herein, the term “VH” refers to the variable region of an immunoglobulin heavy chain of an antibody, including the heavy chain of an Fv, scFv, or Fab. References to “VL” refer to the variable region of an immunoglobulin light chain, including the light chain of an Fv, scFv, dsFv or Fab. Antibodies (Abs) and immunoglobulins (Igs) are glycoproteins having the same structural characteristics. While antibodies exhibit binding specificity to a specific target, immunoglobulins include both antibodies and other antibody-like molecules which lack target specificity. Native antibodies and immunoglobulins are usually heterotetrameric glycoproteins of about 150,000 Daltons, composed of two identical light (L) chains and two identical heavy (H) chains. Each heavy chain of a native antibody has at the amino terminus a variable domain (VH) followed by a number of constant domains. Each light chain of a native antibody has a variable domain at the amino terminus (VL) and a constant domain at the carboxy terminus.

[0450] The recitation of a listing of chemical groups in any definition of a variable herein includes definitions of that variable as any single group or combination of listed groups. The recitation of an embodiment for a variable or aspect herein includes that embodiment as any single embodiment or in combination with any other embodiments or portions thereof.

[0451] All terms are intended to be understood as they would be understood by a person skilled in the art. Unless defined otherwise, all technical and scientific terms used herein have the same meaning as commonly understood by one of ordinary skill in the art to which the disclosure pertains

[0452] In this application, the use of the singular includes the plural unless specifically stated otherwise. It must be noted that, as used in the specification, the singular forms “a,” “an” and “the” include plural referents unless the context clearly dictates otherwise. In this application, the use of “or” means “and/or” unless stated otherwise. Furthermore, use of the term “including” as well as other forms, such as “include”, “includes,” and “included,” is not limiting.

[0453] As used in this specification and claim(s), the words “comprising” (and any form of comprising, such as “comprise” and “comprises”), “having” (and any form of having, such as “have” and “has”), “including” (and any form of including, such as “includes” and “include”) or “containing” (and any form of containing, such as “contains” and “contain”) are inclusive or open-ended. This wording indicates that specified elements, features, components, and/or method steps are present, but does not exclude the presence of other elements, features, components, and/or method steps. Any embodiments specified as “comprising” a particular component(s) or element(s) are also contemplated as “consisting of” or “consisting essentially of” the particular component(s) or element(s) in some embodiments. It is contemplated that any embodiment discussed in this specification can be implemented with respect to any method or composition of the present disclosure, and vice versa. Furthermore, compositions of the present disclosure can be used to achieve methods of the present disclosure.

[0454] The term “about” or “approximately” means within an acceptable error range for the particular value as determined by one of ordinary skill in the art, which will depend in part on how the value is measured or determined, i.e., the limitations of the measurement system.

[0455] Reference in the specification to “some embodiments,” “an embodiment,” “one embodiment” or “other embodiments” means that a particular feature, structure, or characteristic described in connection with the embodiments is included in at least some embodiments, but not necessarily all embodiments, of the present disclosures.

### BRIEF DESCRIPTION OF THE DRAWINGS

[0456] FIGS. 1A and 1B provide schematics showing an engineered stem cell antibody paired evasion approach (ESCAPE). FIG. 1A provides a schematic showing conditioning with a mAb. A bone marrow niche may be depleted with mAb interfering with an essential protein expressed on the surface of stem cells. Following marrow clearance, hematopoietic stem cells (HSCs) containing mutations in the mAb-targeted protein that make the cells resistant toward mAb ablation can be supplied for engraftment. In some cases, the method involves administering the antibody more than once (i.e., re-dosing). FIG. 1B provides a schematic showing selective enrichment of engineered hematopoietic stem cells (eHSC) harboring mutations in an essential cell surface protein. (e.g., CD117). HSC can be engineered, through base editing, to contain non-synonymous mutations that do not inhibit normal cellular function and resist mAb ablation. Unedited or endogenous cells remaining in the niche can be selectively eliminated due to sensitivity to mAb binding and interference.

[0457] FIG. 2A-2D provide schematics showing an engineered stem cell antibody paired evasion (ESCAPE) approach to non-genotoxic cell conditioning. FIG. 2A provides a schematic showing how base editing can be used to generate cells having increased fetal hemoglobin production (HbF) and an altered CD117 (c-KIT) polypeptide that has reduced binding to an antibody (e.g., a non-genotoxic stem cell factor-(SCF-)blocking antibody). In embodiments, cell conditioning strategy eliminates the need for busulfan conditioning by replacing the chemotherapy agent with a non-genotoxic SCF-blocking antibody. The strategy includes modifying the CD117 (c-KIT) antigen by creating a single or multiple-nucleotide polymorphism (SNP or nucleotide alteration) through base editing. In embodiments, the SNP in c-KIT (e.g., a non-synonymous mutation) prevents or reduces antibody (Ab) (e.g., ABTx052) binding. In embodiments, the modification to the CD117 antigen is multiplexed with an edit to a sickle cell disease (SCD) target (e.g., an edit associated with an upregulation in fetal hemoglobin (HbF) expression, such as an edit to a promoter region). In some cases, both edits are carried out using the same adenosine base editor (ABE) in combination with two or more guide RNAs (gRNAs) (e.g., sgRNA_015 and a CD117-targeting gRNA). In various instances, the edited cells are derived from a patient to which they are to be administered. FIGS. 2B and 2C provide schematics showing how combining an SCF-blocking antibody that is specific for wild type c-KIT antigen will ablate cells that are displaying wild type c-KIT. Therefore, ESCAPE enables the selective enrichment of c-KIT edited cells. FIG. 2C provides a schematic showing that unedited cells are depleted when an SCF-blocking antibody is present. In embodiments, cells that contain a modified c-KIT polypeptide are not depleted by the SCF-blocking antibody and repopulate and engraft. Multiplex-edited cells (i.e., cells with an edit for treatment of sickle cell disease and an edit to the CD117 antigen) are administered in embodiments concurrently with, after, or prior to administration of an SCF-blocking antibody, where the administration of the antibody is associated with enrichment of the edited cells in a subject. FIG. 2D provides a schematic showing how alteration of a CD117 epitope encoded by an HSC using base editing allows the HSC to selectively evade being bound by an antibody that binds the CD117 epitope.

[0458] FIG. 3 provides a schematic summarizing screens that were completed to identify ABE8.8-compatible guides (left panel) for use in introducing alterations to CD117 antigens and antibodies showing reduced binding to the altered antigens (right panel) and suitable for use in the ESCAPE approach to non-genotoxic cell conditioning. The guides identified in the screens included CC128, CC79, and CC89. The antibodies identified in the screens included ABTx052, ABTx062, ABTx025, ABTx030, ABTx070, and ABTx071. As shown in the left panel of FIG. 3, 102 guide RNAs capable of installing missense mutations were computationally identified. Among these, 27 gRNAs were selected based on highest editing efficiencies in HEK293 cells. 8 gRNAs were selected based on high editing efficiencies in CD34+ cells. CD117 mutations produced by these gRNAs were characterized and 5 were chosen based on retention of normal ligand binding and phosphorylation capability in vitro. Also, as shown in the right panel of FIG. 3, 188 mAb clones were identified among which 72 clones had unique variable heavy chains (VH). 66 of these clones were screened for binding to wild type and variant CD117 proteins. 6 such antibodies were selected based on binding to wild type CD117 and lack of binding to variant CD117. One of the lead antibodies blocked CD117 binding to its natural ligand SCF and did not bind to one of the lead edits.

[0459] FIG. 4 provides crystallographic images of CD117 showing the location of amino acid residue alterations of the present disclosure. The alterations included T144A (sgRNACC89); Y249C and N260D (sgRNA CC128); and M351T (sgRNA CC79). The edits Y259C and N260D were located near the stem cell factor (SCF) binding site. In FIG. 4 the following alteration locations are highlighted in the structural images from top-to-bottom: Highlighted sites top to bottom: (CC89) T144A; (CC128) Y259C N260D; (CC79) M351T; and (CC78) Y418C. The protospacer corresponding to the guide RNA CC128 is provided in the figure and corresponds to SEQ ID NO: 830.

[0460] FIGS. 5A-5F provide plots and a histogram showing that ABTx052 lacks binding to CD117 edited using the guide CC128 and ABE8.8 (CC128-edited CD117), and blocks stem cell factor (SCF) binding to wild type CD117. FIG. 5A provides a plot showing biolayer interferometry (BLI) measurements demonstrating that ABTx052 (mAB-7) did not bind to the CC128-edited CD117 as purified protein. ABTx052 did bind with wtCD117 expressed on M07e cells with high affinity (20 μM). ABTx052 rapidly dissociated from CC128-edited CD117. The monoclonal antibody mAb-7 bound wtCD117 with a high affinity (KD<1E-12) but bound minimally to CC128-edited CD117. FIGS. 5B and 5F provide a plots showing that ABTx052 (mAB-7) blocked SCF binding to CD117. FIG. 5C provides a histogram showing that ABTx052 did not bind to the CC128-edited CD117 as expressed in M07e cells. FIG. 5D provides a plot showing that ABTx052 had an EC50 of about 20 μM. The vertical lines in FIGS. 5A and 5B indicate times of substrate addition (e.g., ABTx052 or SCF addition). FIG. 5E provides a plot showing flow cytometry data demonstrating that unedited CD34+ cells were bound highly (EC50 0.02 nM) by mAb-7 modified ton include a LALADA Fc alteration (i.e., ABTx135), while CD34+ cells edited with CD117 sgRNA showed minimal binding by the antibody. ABTx135 showed minimal binding to CD34+ cells expressing a CD117 variant prepared using guide CC128. 100,000 Unedited or CD117-edited human CD34+ hematopoietic stem and progenitor cells were incubated with varying concentrations of ABTx135, which corresponded to ABTx052 containing an LALADA alteration in the Fc domain, for 20 minutes at 4C in 100 μL total staining volume in PBS+2.5% FBS. After 20 minutes the cells were pelleted by centrifugation at 500×G for 5 minutes at 4 C. Supernatant was removed, and cells were washed 2 times in PBS+2.5% FBS. After the 2 washes, 100 μL of the secondary detection antibody at concentration of 25 μg/mL was added to the cell pellet. Cells were incubated with the secondary antibody for 20 minutes at 4 C. Cells were then washed 2 times with PBS+2.5% FBS at 4 C. Finally, cells were suspended in 100 μL of PBS+2.5% FBS and analyzed using flow cytometry. Geometric mean fluorescence intensities of staining were plotted (y-axis) with log of ABTx135 concentration (x-axis). Staining of cells with secondary antibody alone (dotted line) was used as negative control. Flow cytometry showed binding of mAb-7 to unedited CD34+ cells and lack of binding to CD117-edited CD34+ cells. Secondary antibody details: Goat anti-Human IgG Fc Cross-Adsorbed Secondary Antibody, DyLight 650, ThermoFisher, Cat #SA5-10137.

[0461] FIGS. 6A and 6B provide an SDS-PAGE gel image and a size-exclusion chromatography plot, respectively, showing the purity of the ABTx052 antibody.

[0462] FIGS. 7A and 7B provide plots showing the in vitro evaluation of mAb binding at increasing doses between unedited human hematopoietic stem cells (HSCs) and HSCs base edited to contain mutations in CD117 to block mAb binding. Human CD34+ cells edited with ABE8.8 and CD117-targeting guide RNA escaped recognition by the antibodies ABTx062 and ABTx052 that bind to unedited human HSCs expressing wild type CD117. The mAbs ABTx062 and ABTx052 showed loss of binding to CD34+ hematopoietic stem and progenitor cells (HSPCs; HSCs) edited using gRNA CC128. Edited cells expressed CD117*Y259C/N260D. The desired nucleotide edits caried out using the CC128 guide were 5G+7G.

[0463] FIGS. 8A to 8G provide plots and a bar graph showing that the CC128 engineered CD117 epitope was protective against ligand blocking by ABTx052 in vitro. FIGS. 8A and 8B provide plots showing that at Days 2 and 5 post-transfection, cells edited using the CC128 guide showed improved viability in the presence of ABTx052 relative to unedited cells. Cell viability of primary CD34+ derived edited cells with CC128 guide alone cultured in the presence (and absence of stem cell factor (SCF)) at increasing concentrations of ABTx052 Ab was preserved. Unedited cells exposed to ABTx052 exhibited viability that resembled complete withdrawal of SCF (dotted line). FIG. 8C shows that cells containing the target 5G+7G dual nucleotide edit combination introduced using the CC128 guide were enriched for in a 1:1 mix of edited and unedited cells over time in the presence of ABTx052. Next-generation sequencing (NGS) of the 1:1 mixes was used to show the enrichment by demonstrating an increase in editing frequency.

[0464] FIGS. 8D and 8E provide plots showing that contacting cells expressing a wild type CD117 polypeptide (“unedited cells”) with ABTx052 mimicked complete SCF withdrawal and led to ˜85% loss of viability in vitro, while edited cells showed increased viability relative to the unedited cells. Unedited, CD117-edited, and a 1:1 mixture of unedited and CD117-edited CD34+ cells were cultured in presence of varying concentrations of mAb-7 for 7 days. mAb-7 treatment depleted unedited cells to the level of complete SCF starvation (dotted line), while CD117-edited cells retained viability. Cell viability levels for the mixed population maintained an intermediate value. FIG. 8F provides a bar graph showing enrichment for base-edited cells containing a CC128 engineered CD117 epitope in in a co-culture of edited and non-edited cells contacted with concentrations of mAb-7 ranging from 100 ng/mL to 10000 ng/mL. After 7-days of co-culture in the presence of absence of mAb-7, genomic DNA was isolated from the co-cultures and subjected to next generation sequencing (NGS). NGS showed enrichment of CD117 editing in the treated cells compared with an untreated control. FIG. 8G provides a plot showing that mAb-7 selectively depleted unedited hematopoietic stem cells while cells expressing an engineered CD117 (engineered through base editing using the guide CC128) retained viability in vitro. In FIG. 8G, the dotted horizontal line represents cell viability corresponding to complete SCF starvation, and the control corresponded to cells that were not treated with mAb-7.

[0465] FIG. 9 provides a schematic diagram showing the design of an in vivo study to determine if CD117 edited cells had a similar function as wild type CD117 cells. Unedited or CD117-edited CD34+ cells were transplanted into NBSGW mice. Mouse bone marrow was harvested and subjected to flow cytometry and NGS analyses 16 weeks post transplantation. Marrow hematopoietic compartments were sorted.

[0466] FIGS. 10A and 10B provide a bar graph and a flow cytometry plot showing that engraftment of CD117 variants prepared using the guides CC79, CC84, CC89, CC90, CC119, and CC128 was not altered by base editing, as measured after an 8-week engraftment using flow cytometry. FIG. 10B provides a representative flow cytometry plot demonstrating engraftment of edited human CD45+ cells (hCD45+) in a mouse administered the cells. In FIG. 10B unedited mouse CD45+ cells are represented by the term “mCD45+.”

[0467] FIGS. 11A and 11B provide stacked bar graphs showing that CD117 edits were retained in the bulk bone marrow at the 8-week time point of engraftment. FIG. 11A shows percent editing 48 hours post electroporation (EP) in cells edited using ABE8.8 and the guides CC79, CC84, CC89, CC90, CC119, and CC128. The edits were 5G, 6G, 7G, 8G, 5G+7G, 6G+7G, and 6G+8G. FIG. 11B shows bulk bone marrow (BM) editing measured after 8 weeks of engraftment. In FIG. 11A, going from top-to-bottom of each stacked bar and from left to right, the edits represented in each bar are, where each bar is separated by a semicolon: 6G+8G, 8G; 6G+8G, 6G; 5G; 6G+7G, 7G, 6G; 5G; 5G+7G, 7G, 5G; and 7G. In FIG. 11B, going from top-to-bottom of each stacked bar and from left to right, the edits represented in each bar are, where each bar is separated by a semicolon: 6G+8G, 8G, 6G; 6G+8G, 6G; 5G; 6G+7G, 7G, 6G; 5G; 5G+7G, 5G; and 7G.

[0468] FIG. 12 provides a schematic showing that multiplex editing advantageously preserved therapeutic editing levels in hematopoietic stem cells (HSCs) and what the desirable multiplex edit (i.e., “Multiplex edited HSCs) was. In an embodiment, cells are multiplex edited using ABE8.8 in combination with a guide RNA for introducing an edit to a CD117 polynucleotide and an sgRNA_015 guide (HPFH edit). The guide sgRNA_015 was used to introduce a therapeutic edit to the cells and targeted the HBG1/2 promoter, and the sgRNA CC128 was used to introduce a conditioning edit to the cells and targeted a CD117 polynucleotide. In FIG. 12, SCF is represented by a filled-in grey circle, and +BEAM-101 gRNA indicates sgRNA_015.

[0469] FIGS. 13A and 13B provide stacked bar graphs showing that multiplex editing with sgRNA HBG1/2a-114 (sgRNA_015) and gRNA CC128 yielded highly efficient A: T to G: C base editing. FIG. 13A provides a stacked bar graph showing editing rates at the CD117 site targeted by the CC128 guide. FIG. 13B provides a stacked bar graph showing editing rates at the HBG1/2a-114 site targeted by sgRNA_015.

[0470] FIG. 14 provides a schematic showing a strategy for generating single cell clones for de-risking individual CC128 edits.

[0471] FIGS. 15A and 15B provide bar graphs showing editing rates for M07e clones and staining of the M07e clones with the antibody ABTx052. FIG. 15A provides a stacked bar graph showing allelic editing in the indicated clones. Going from top-to-bottom and from left-to-right, the edits depicted in each bar, where each bar is separated by a semicolon, are: 7G, 5G+7G, 5G; 7G, 5G+7G, 5G; 7G, 5G+7G, 5G; 7G, 5G+7G, 5G; 5G; 5G; 7G, 5G+7G+10G, 5G+7G, 5G; 7G, 5G+7G, 5G; and 7G, 5G+7G (where the location of the nucleotide edits are indicated by subscripts within the following sequence: 5′-AAATA₅TA₇ATA₁₀GCTGGCATCA-3′(SEQ ID NO: 830)). FIG. 15B provides a bar graph showing that some of the M07e clones showed reduced ABTx052 staining. The genotypes of the clones indicated on the x-axis of FIGS. 15A and 15B are provided in Table 12.

[0472] FIGS. 16A-16D provide Western blot images and a plot showing that Y259C (5G) and Y259C+N260D (5G+7G) CD117 mono-allelically edited cells could bind ligand (stem cell factor (SCF)) and induce phosphorylation in the presence of ABTx052 and that, therefore, the edited CD117 polypeptides were functional. FIG. 16A provides a Western blot image demonstrating phosphorylation of CD117 in the indicated clones (see Table 12 for a description of the clone allelic editing compositions). Cells were incubated with 1 μg/mL of ABTx052 antibody for 5 min before addition of SCF at 100 ng/ml for 10 min. Phospho CD117 was probed with anti-phospho CD117 ab Y719. FIG. 16B provides a plot showing how cells edited using the guide CC128 show increased viability in the presence of ABTx052 at the concentrations indicated on the x-axis and 100 ng/mL SCF relative to unedited (UN) cells under the same conditions. The monoclonal antibody ABTx052 (mAbABTx052) reduced cell proliferation of unedited cells by blocking c-KIT binding with SCF. Distinct differences in cell survival were observed between unedited and CC128 variant primary hematopoietic stem cells (HSCs) upon culturing with ABTx052. CC128-edited cells displayed higher survival relative to unedited cells. FIG. 16C provides a Western blot image showing phosphorylation of CD117 in cells edited using the indicated guides (CC128 or CC295) in combination with ABE8.8. The Western blot also shows that ABTx052 did not block SCF binding to the CD117 polypeptide altered using the CC128 guide. The cells were M07e cells. Cells were stimulated with 100 ng/mL SCF for 10 minutes. The c-KIT was probed using mAB 332. Phospho-c-KIT was probed using mAb Y719. CD117 edited using the guide CC128 was phosphorylated upon SCF stimulation. ABTx052 blocked phosphorylation of unedited c-KIT polypeptides. FIG. 16D provides a Western blot image showing results from an experiment in which M07e cell lines that were unedited, base edited with CD117-sgRNA, or CD117-knockout (KO) were treated with 100 ng/mL SCF in presence or absence of mAb-7. Phosphorylated CD117 was probed with anti-phospho CD117 mAb Y719. Cells expressing wild type CD117 underwent phosphorylation upon SCF stimulation, as did cells containing CD117 mono-allelic and bi-allelic edits. mAb-7 inhibited phosphorylation of WT CD117. Bi-allelically edited cells underwent normal levels of phosphorylation even in the presence of mAb-7. mAb-7 reduced but did not completely inhibit CD117 phosphorylation in cells containing a mono-allelic CD117 edit. CD117-KO cells served as a negative control.

[0473] FIG. 17 provides a schematic depicting a screen completed to identify new guides for use with an ABE-NRCH non-G PAM editor to alter a polynucleotide encoding a CD117 polypeptide. The criteria for selection from guide screening in HEK293 T cells were the following: 1) intended edit achieved at a frequency >25% of good next-generation sequencing quality, 2) low heterogeneity in final protein variant being generated, 3) conservation of protein sequence between cynomolgus genome (required at amino acid being targeted and preferred if 100% conserved).

[0474] FIGS. 18A and 18B provide flow cytometry histograms. FIG. 18A provides overlayed flow cytometry histograms showing that overall CD117 expression in cells remained constant following editing using the guides gRNA931 (CC200) and CC128. Expression was measured using the monoclonal antibody (mAb) 104D2. FIG. 18B provides overlayed flow cytometry histograms showing that CD34+ cells edited using gRNA 931 lacked binding to ABTx052.

[0475] FIG. 19 provides a plot showing that the CD117 S261G engineered epitope was protective against ligand blocking by ABTx052 in vitro. Cells edited using gRNA931 (CC200) showed increased viability relative to unedited cells when contacted with ABTx052 at the concentrations indicated on the x-axis.

[0476] FIGS. 20A-20H provide bar graphs showing percent human CD34+ (FIG. 20A), CD15+ (FIG. 20B), CD19+ (FIG. 20C), Lin−CD34+ (FIG. 20D), CD3+ (FIG. 20E), hCD33+SSC-Alow (FIG. 20F), GlyA (FIG. 20G), and CD33+SSC-Ahi (FIG. 20H) cells in mice following 8 weeks of engraftment with cells edited using the guides indicated on the X-axis (CC79, CC84, CC90, CC119, and CC128).

[0477] FIGS. 21A and 21B provide a stacked bar graph and a bar graph demonstrating highly efficient, bi-allelic editing was achieved in CD34+ cells and that the cells had normal colony forming unit (CFU) capacity. FIG. 21A provides a stacked bar graph showing that cells edited using the indicated guides (CC79, CC128, CC84, CC90, CC89, and CC119) had normal colony forming unity capacity, which was consistent with CD117 function being preserved, and that disrupting CD117 function (e.g., by editing using the guides 291 or 295) adversely impacted the colony forming ability of the edited cells. Disrupting CD117 function impacted the colony forming ability of the erythroid population. CFU assays indicated that editing c-KIT had minimal effect on myeloid colony formation. FIG. 21B provides a bar graph showing percent A>G editing achieved using the indicated guides (CC79, CC128, CC84, CC90, CC89, and CC119) after 24 hours (first bar from the left in each set of 3), 48 hours (second bar from the left in each set of 3), and 120 hours (3rd bar from the left in each set of 3). Over 85% bi-allelic editing was achieved.

[0478] FIGS. 22A-22D provide bar graphs demonstrating that c-KIT knock-out profoundly affected erythroid in vitro differentiation. FIG. 22A shows the total number of burst forming unit-erythroid cells (BFU-E) measured after cells were edited using the indicated guides (HFPH (sgRNA_015), CC119, CC126, CC290, CC291, CC292, CC293, CC294, and CC295). FIG. 22B shows the number of granulocyte-macrophage progenitor (GMP) colony forming units (CFU-GM) measured after cells were edited using the indicated guides (HFPH (sgRNA_015), CC119, CC126, CC290, CC291, CC292, CC293, CC294, and CC295). FIGS. 22C and 22D show levels of in vitro differentiation and myeloid 7-days post-transfection using the indicated editors. In FIGS. 22C and 22D, the bars from left-to-right correspond to the following: Unedited, HPFH (sgRNA_015), CC119, CC126, CC290, CC291, CC292, CC293, CC294, and CC295. Knockout edits results in profound erythroid in vitro differentiation defect and less profound myeloid differentiation defect.

[0479] FIGS. 23A and 23B provide stacked bar plots and bar plots showing results relating to editing of CD34+HSPCs to install c-KIT mutations. FIG. 23A provides a stacked bar plot showing editing efficiency with selected c-KIT guides (CC79, CC84, CC89, CC90, CC119, and CC128). Highly efficient editing in CD34+HSPCs was achieved and lead to expression of mutant c-KIT polypeptides in edited cells. FIG. 23B provides a bar graph showing that knocking out c-KIT (using guides CC291 and CC295) disrupted erythroid differentiation in vitro, but that editing using the guides HPFH (sgRNA_015), CC78, CC79, CC94, CC89, CC90, CC119, CC128, or CC84+CC90 did not. Mutations to c-KIT were selected that did not disrupt HSPC function and differentiation.

[0480] FIG. 24 provides a Western blot showing that the guides 291 and 295 used in combination with ABE8.8 were useful in successfully knocking out expression of CD117. Unedited & edited CD34 cells were stimulated with stem cell factor (SCF) for 10 mins and the cell lysate was subjected to a western blot using anti-CD117 antibody (MAB332) and anti-phospho CD117 antibody (Y719). Editing CD34+HSCs with KO sgRNA 291 & 295 and ABE8.8 mRNA displayed no CD117 phosphorylation.

[0481] FIG. 25 provides fluorescent images of cells showing that CD117 altered using the guide CC128 was internalized upon binding to stem cell factor (SCF), which is consistent with the altered CD117 polypeptide maintaining its function. SCF was conjugated with the pH-sensitive dye pHrodo-green. pHrodo-green fluoresces only when it enters a cell. Measurement of pHrodo-green fluorescence indicates internalization of the ligand-bound SCF.

[0482] FIG. 26 provides a stacked bar graph showing percent target, bystander, and non-synonymous bystander A>G edits corresponding to the indicated base editors. In FIG. 26 each bar indicates from top-to-bottom “other non-synonymous bystanders”, “1G bystander”, and “favorable” edits. In FIG. 26 “XVIVO” refers to the serum free stem cell medium in which cells were grown, “IVD” refers to “in vitro differentiated erythroid cultures (IVD)”, and “d5” and “d7” refer to five days and seven days, respectively.

[0483] FIG. 27 provides a stacked bar graph showing editing efficiencies (A to G %) for the base editors ABE8.20-NRCH (1570), ABE9v1-NRCH (2517), and ABE9v2 (2518) used in combination with the guide gRNA931 (CC200). In each stacked bar of FIG. 27, the following edits are shown in order from top-to-bottom: “3G_4G_6G,” “4G_6G,” “3G_6G,” and “6G.”

[0484] FIG. 28 provides histograms showing that cells expressing CD117 polypeptides altered using ABE8.20-NRCH (1570), ABE9v1-NRCH (2517), or ABE9v2 (2518) in combination with the guide gRNA931 (CC200) showed reduced binding to the antibody ABTx052. Cells were evaluated 2 days post-electroporation (EP). In FIG. 28, “1” indicates cells edited using ABE8.20-NRCH, “2” indicates cells edited using ABE9v1-NRCH, and “3” indicates cells edited using ABE9v2.

[0485] FIGS. 29A-29C provide bar graphs, a flow cytometry histogram, and plots showing that highly efficient multiplex editing of CD117 and HBG1/2 was achieved in CD34+ hematopoietic stem cells (HSPCs). FIG. 29A provides bar graphs showing successful multiplex base-editing of CD34+ cells using sgRNAs against polynucleotides encoding CD117 and HBG1/2. Multiplex base editing efficiency was equivalent to single-plex for both sgRNAs used. Multiplex editing of HBG1/2 and CD117 polynucleotides led to efficient editing of both with efficiencies of greater than 85%. Single clonal analysis revealed that all cells had HBG1/2 editing in the multiplex editing condition. CD117 multiplex editing outcomes were: >97% bi-allelic, 1.5% mono-allelic, and 1.5% unedited. FIG. 29B provides plots showing that multiplex base editing of a CD117 polynucleotide in combination with editing of an HBG1/2 polynucleotide did not hinder γ-globin induction in edited cells. About 60% gamma globin induction was detected in IVED cells differentiated from multiplex edited CD34+ cells. FIG. 29C provides a flow cytometry histogram showing that multiplex edited cells escaped recognition by mAb-7.

[0486] FIG. 30 provides a bar graph showing SCF blocking by mAb-7 significantly inhibited erythroid colony formation. Contacting cells with mAb-7 (i.e., ABTx052) led to enrichment of CD117 base edited cells. A 1:1 mixture of unedited and cells base-edited using the guide CC128 in combination with a base editor were plated in semi-solid media in the presence of varying concentrations of mAb-7. At day-14 individual erythroid colonies (BFU-E) were picked and sequenced (n=24 colonies were sequenced for each condition). In the absence of mAB-7, an even distribution of edited and unedited colonies was observed. Increasing concentration of mAB-7 yielded higher proportions of edited colonies. 100% of colonies at mAB-7 concentrations of 100 ng/ml or higher contained either the 5G or 5G_7G edit. Very few BFU-E colonies were observed upon incubation with SR1. A few of the selected colonies at higher antibody concentrations contained CD117 edit in only one allele indicating that a monoallelic editing may be sufficient to evade antibody blocking by mAb.

[0487] FIGS. 31A and 31B provide a bar graph and stacked histograms showing successful multiplex editing of both a CD117 polynucleotide and a beta globin gene in CD34+ hematopoietic stem cells. FIG. 31A provides a bar graph showing high multiplex editing at the sites targeted by the guides sgRNA_017 (Makassar sgRNA) and gRNA931 (CD117 sgRNA; CC200). Highly efficient CD117 and Makassar editing (n=3) was achieved in mobilized peripheral blood-derived (mPB) CD34+ cells using a single base editor in combination with two guide polynucleotides (sgRNAs). FIG. 31B provides a flow cytometry histogram showing that both edited and unedited cells were bound by a pan CD117 antibody (Pan CD117 Ab), but that the edited cells showed reduced binding to the antibody mAb-7 (i.e., ABTx052).

[0488] FIGS. 32A-32C provide structural images and a plot. The images of FIGS. 32A and 32B correspond to a ˜3.0 Å Cryo-EM structural images of CD117/c-KIT in complex with ABTx052-Fab in solution state. In FIG. 32A, each domain is numbered and each number are placed next to the corresponding domain in the figure, where “1” represents the ABTx052 Fab-heavy chain domain, “2” represents the ABTx052 Fab-light chain, “3” represents the D3 domain of CD117, “4” represents the D2 domain of CD117, and “5” represents the D1 domain of CD117. FIG. 32B provides a structural image shaded to indicate structural resolution as estimated by windowed FSC in RELION 3. FIG. 32C provides a plot of Fourier shell correlation against resolution (1/Å) showing that the final resolution of the structure was about 3 Å.

[0489] FIGS. 33A-33D provide a bar graph and plots demonstrating that alteration of the Fc-domain of mAb-7 generated highly potent mAb that did not produce mast cell degranulation in vitro. FIG. 33A provides a bar graph showing that Fc engineered versions of anti-CD117 ABTx052 did not produce mast cell degranulation in vitro. Mast cells generated via in vitro differentiation of CD34+ cells contacted with IgE or interferon gamma to increase expression of the Fc-gamma receptor, were treated with native and Fc-engineered mAb-7. Absorbance at 405 nM measured beta hexosaminidase release and thereby represented mast cell degranulation. The positive control antibodies 104D2 and NEG085 known to cause mast cell degranulation upon incubation with mast cells were used as positive controls for degranulation. In FIG. 33A, mAb-7-FcEng-1, mAB-7-FcEng-2, and mAb-7-FcEng-3, refer to ABTx052 with the Fc modifications LALAPG, LSLTRG, and LALADA respectively. FIG. 33B provides a plot demonstrating that mAb-7 selectively depleted unedited CD34+ cells in vitro, while CD117-edited cells contacted with the antibody retained viability. FIGS. 33C and 33D provide plots showing that Fc-engineered mAb-7 (ABTx135; mAb-7 with an LALADA Fc domain alteration) elicited similar levels of cell depletion in human and Cynomolgus CD34+ cells. In FIGS. 33C and 33D CD34+ cells from human and Cynomolgus sources were cultured in presence of 100 ng/mL SCF and varying concentrations of ABTx135 for 7 days. As control, some cells were cultured without any SCF. Cell viability was assessed at day 7 using Cell titer glo reagent following manufacturer's instructions. ABTx135 elicited similar levels of cell depletion in human and Cynomolgus CD34+ cells. Cell titer glo measurements at day 7 showed that mAb-7 treatment depleted unedited cells to the level of complete SCF starvation, while CD117-edited cells retained viability.

[0490] FIGS. 34A and 34B provide schematic diagrams showing how adenine base editors (ABEs) can be used to chemically modify target bases in a polynucleotide sequence. FIG. 34A provides a schematic showing that, in embodiments, an ABE is a fusion protein comprising an evolved TadA* deaminase connected to a CRISPR-Cas enzyme. The base editor binds to a target sequence that is complementary to the guide-RNA and exposes a stretch of single-stranded DNA. The deaminase converts the target adenine into inosine (which is read as guanine by DNA polymerases) and the Cas enzyme nicks the opposite strand. The nicked strand is repaired completing the conversion of an A: T to G: C base pair. FIG. 34B provides a schematic diagram showing how naturally-occurring base changes cause Hereditary Persistence of Fetal Hemoglobin (HPFH), which protects patients from SCD/B-Thal. Base editors can reproduce these changes, leading to high, consistent levels of fetal hemoglobin. Higher fetal hemoglobin can be associated with further reductions in symptoms of a hemoglobinopathy (e.g., sickle cell disease).

[0491] FIGS. 35A and 35B provide bar graphs showing that editing of CD117 polynucleotides in CD34+ cells did not alter long-term engraftment and multi-lineage reconstitution in a rodent model. FIG. 35A provides a bar graph showing that CD117-base edited cells produced stable long-term (16-week) engraftment in NBSGW mice. Unedited (light-grey bars) and CD117-base edited (dark-grey bars) CD34+ cells produced similar levels of multi-lineage reconstitution. FIG. 35B provides a bar graph showing next-generation sequencing (NGS) results demonstrating high CD117 editing levels within different hematopoietic compartments.

[0492] FIGS. 36A to 36D provide a schematic diagram and bar graphs demonstrating that mAb-7 selectively depleted unedited cells from the bone marrow (BM) of mice transplanted with hCD34+ cells. FIG. 36A provides a schematic diagram of an in vivo study to evaluate anti-CD117-mAb-mediated myeloablation. Irradiated NSG mice were first humanized with either unedited cells or a 1:1 mixture of unedited and multiplex-edited CD34+ cells. 4 weeks post-transplantation, mice were either left untreated, or treated with either isotype control antibody or mAb-7 according to mouse groups listed in right panel. Mouse bone marrow was harvested at indicated time points and analyzed using flow cytometry. Next-generation sequencing (NGS) was performed with bulk bone marrow and sorted CD34+ cells. FIG. 36B provides bar graphs showing a significant reduction in human chimerism was observed at 8 weeks (top panel) and 12 weeks (bottom panel) post dosing. FIG. 36C provides bar graphs showing the CD34+ cell population was also abrogated at 8 (top panel) and 12-week (bottom panel) time points. FIG. 36D provides bar graphs showing editing at HBG1/2 and CD117 target sites within the bulk bone marrow (left panel) and the sorted CD34+ cells (right panel) and demonstrating significant enrichment of editing in the mAb-7 treatment group compared with the isotype control group, indicating in vivo selection of multiplex-edited cells. In FIG. 36D, each set of four bars represents, from left-to-right, the following mouse groups: D, E, D, E. In FIGS. 36A-36D the letters “A” to “E” are used to refer to the following mouse groups: A) unedited cells and no antibody treatment; B) unedited cells and treatment with a control isotype antibody; C) unedited cells and treatment with mAb-7; D) 1:1 ratio of edited and unedited cells and treatment with the control isotype antibody; E) 1:1 ratio of edited and unedited cells and treatment with mAb-7.

[0493] FIG. 37 provides a schematic diagram showing the design of an in vivo experiment to evaluate ABTx052-mediated enrichment of multiplex base-edited cells in NSG mice. The multiplex base-edited cells contained an altered CD117 polynucleotide and an altered HBG1/2 polynucleotide.

[0494] FIG. 38 provides bar graphs showing engraftment data measured by human CD45+ cell chimerism over time in mice. Depletion of unedited cells was observed following administration of mAb (ABTx052) to the mice. The mice were treated as described in FIG. 37. The study conditions referenced in FIG. 38 are described in Table 15.

[0495] FIG. 39 provides bar graphs showing HSC bone marrow analysis results demonstrating selective depletion of unedited CD34+ hematopoietic stem cells (HSCs) in mice engrafted with the cells and exposed to ABTx052 post-engraftment. The mice were treated as described in FIG. 37. The study conditions referenced in FIG. 38 are described in Table 26.1.

[0496] FIGS. 40A and 40B provide stacked bar graphs showing allelic frequencies for HBG1/2 edits and CD117 edits measured at eight weeks post ABTx052 administration in mice treated as described in FIG. 37, in bone marrow (FIG. 40A) and in CD34+ cells (FIG. 40B). The groups referenced in FIG. 38 are described in Table 15.

[0497] FIGS. 41A and 41B provide plots showing ABTx052 cell binding as measured on (FIG. 41A) M07e cells expressing wild-type (WT) or base-edited (ESCAPE-2 variant) CD117 and (FIG. 41B) mobilized peripheral blood (mPB) human CD34's expressing wild-type (WT) or base-edited (ESCAPE-2 variant) CD117. Cells expressing WT showed high affinity binding to ABTx052, while cells expressing the ESCAPE-2 variant did not. In both cell types, highly selective binding of ABTx052 was observed for WT but not for the ESCAPE-2 variant produced in the cells through base editing according to the methods provided herein.

[0498] FIGS. 42A and 42B provide a plot and a bar graph showing that ABTx052 (an SCF blocking antibody) was capable of mediating the depletion in culture of cells expressing wild-type CD117, but that cells expressing an altered CD117 polypeptide with reduced binding affinity for ABTx052 escaped depletion. ABTx052 (FIG. 42A) selectively depleted unedited hCD34+ cells in vitro and (FIG. 42B) enriched for cells base edited to express the altered CD117 polypeptide. Cells were evaluated on the fourth and tenth days following being contacted with ABTx052. The cells expressing the wild-type CD117 polypeptide were also base edited to express the Makassar variant of beta hemoglobin (HBB). In FIGS. 42A and 42B, “no SCF culture condition” indicates cell viability observed for cells grown in the absence of SCF, and “ESCAPE-2 variant” indicates cells base edited to express the altered CD117 polypeptide and the Makassar variant of HBB. In the plot of FIG. 42A, unedited, CD117-edited (ESCAPE-2 variant, CC200/gRNA931), and a 1:1 mixture of unedited and CD117-edited CD34+ cells were cultured in presence of 100 ng/mL SCF and varying concentrations of ABTx052 for 4 days prior to analysis. As a control, some cells were cultured without any SCF, and their viability is shown by the dotted line in the plot. Cell viability was assessed at day 4 following being contacted with ABTx052 using a Cell titer glo reagent following manufacturer's instructions. Treatment with ABTx052 depleted unedited cells to the level of complete SCF starvation (dotted line), while CD117-edited cells retain viability. Cell viability levels for the mixed population maintained an intermediate value. The bar graph of FIG. 42B shows that next-generation sequencing of genomic DNA isolated from untreated and ABTx052 treated cells at day 10 demonstrated enrichment of CD117 editing in the treated cells compared with the untreated control.

[0499] FIG. 43 provides a Western blot image showing that both bi and mono-allelically multiplex base edited M07e cells base edited to express an altered CD117 polypeptide with reduced binding to ABTx052 and the Makassar variant of beta hemoglobin (HBB) variant retained CD117 phosphorylation upon stimulation with SCF, even in the presence of ABTx052. Phosphorylation of WT CD117 was blocked upon being contacted with ABTx052.

[0500] FIGS. 44A and 44B provide bar graphs showing in vivo depletion of unedited hematopoietic stem and progenitor cells (HSPCs) 2 weeks post-dosing with ABTx052 or ABTx135 (4 week post-humanization). FIG. 44A provides bar graphs showing total chimerism (left bar graph) and Lin−CD34+CD117+HSPC frequencies (right bar graph) of mice (n=3) dosed with ABTx135. FIG. 44B provides a bar graph showing chimerism levels measured in the mice at later time points (8 wk and 12 wk following dosing with ABTx052). In FIGS. 44A and 44B, “mAb” represents the ABTx052 or ABTx135 antibody.

[0501] FIGS. 45A-45K provide plots showing kinetics for binding of ABTx052 and variants thereof to wild-type CD117 (Wt CD117) and to the indicated two CD117 variants (CC200 and CC128) expressed from polynucleotides prepared by base editing a polynucleotide encoding wild-type CD117 using a base editor system containing the guide polynucleotide CC200 or CC128 and an adenosine deaminase base editor (ABE). In each of FIGS. 45A-45K, the y-axis represents antibody binding to CD117 in nanomolar and the x-axis represents time. The first vertical line from the left in each of FIGS. 45A-45K represents the time at which CD117 was first contacted with a solution containing the indicated antibody, and the second vertical line from the left represents the time at which the solution in contact with CD117 was replaced with a solution free of any antibody. In FIGS. 45B-45K, the indicated ABTx052 variants each contain a single amino acid alteration, as indicated, in the indicated chain of ABTx052 (i.e., heavy chain variable region (VH) or light chain variable region (VL)). All of the antibodies evaluated were human IgG1 antibodies.

[0502] FIGS. 46A and 46B provide flow cytometry histograms demonstrating reduced binding of the indicated ABTx052 variants to the CD117 variant CC128 expressed from a polynucleotide prepared by base editing a polynucleotide encoding wild-type CD117 using a base editor system containing the guide polynucleotide CC128 and an adenosine deaminase base editor (ABE). In FIGS. 46A and 46B, the indicated ABTx052 variants, with the exception of ABTx062, each contain a single amino acid alteration, as indicated, in the indicated chain of ABTx052 (i.e., heavy chain variable region (VH) or light chain variable region (VL)). All of the antibodies evaluated were human IgG1 antibodies.

[0503] FIG. 47 provides a schematic diagram summarizing some representative advantages of the methods provided herein compared to conditioning methods involving administering an alkylating agent (e.g., busulfan) or an anti-CD117 monoclonal antibody to a subject.

[0504] FIG. 48 provides a plot showing biolayer interferometry (BLI) measurements demonstrating comparable binding of wild-type and CC128-edited CD117 polypeptides to SCF.

[0505] FIG. 49 provides a plot showing wild-type and CC128-edited CD117 showed similar internalization upon SCF stimulation as measured by surface availability of CD117.

[0506] FIGS. 50A and 50B present flow cytometry contour plots and a stacked bar graph showing that hematopoietic stem and progenitor cells (HSPCs) base edited using a base editor system containing the guide CC128 and the base editor ABE8.8 retained normal myeloid and erythroid differentiation in vitro. FIG. 50A provides flow cytometry contour plots showing different myeloid cells generated via in vitro differentiation of the edited and unedited cells. Unedited and edited cells (CC128 cells) showed equivalent myeloid differentiation potential to generate neutrophils, monocytes, eosinophils, basophils, dendritic cells, and plasmocytoid dendritic cells (pDCs) in vitro. FIG. 50B provides a stacked bar graph showing results from colony forming unit (CFU) assays demonstrating that the edited HSPCs had similar colony forming efficiency and comparable colony output to unedited cells. In FIG. 50A, the numbers next to each box represent the percent of total cells counted that fell within the region delimited by the box.

[0507] FIGS. 51A and 51B provide flow cytometry contour plots and a plot showing that hematopoietic stem and progenitor cells (HSPCs) were sensitive to treatment with mAb-7. FIG. 51A provides flow cytometry contour plots showing a gating and sorting strategy for analysis of multipotent long-term hematopoietic stem cell (LT-HSC), multipotent progenitor cell (MPP), common myeloid progenitor cell (CMP), granulocyte-monocyte progenitor cell (GMP), and megakaryocyte-erythroid progenitor cell (MEP) subpopulations of cells contacted with mAb-7 based on cell surface marker expression. Healthy human mobilized peripheral blood derived CD34+HSPCs were stained with cell surface markers to identify long-term HSC, multi-potent progenitor, common myeloid progenitor, granulo-monocytic progenitor, and megakaryocytic-Erythrocytic progenitor subpopulations. These populations were isolated using flow assisted sorting to perform antibody treatment experiments. FIG. 51B provides a plot showing that LT-HSC and other progenitor subpopulations within CD34+ fractions exhibited similar sensitivity to mAb-7 treatment in vitro. Sorted HSPC subpopulations were seeded in a 96-well plate and treated with varying concentrations of ABTx135 and cultured for 5 days in 37° C. tissue culture incubator. Cell viability was measured at day 5 using cell titer glo assay.

[0508] FIGS. 52A-52C provide flow cytometry histograms, a flow cytometry contour plot, and a plot showing that anti-CD117 mAb treatment using mAb-7 induced HSPC apoptosis in vitro. FIG. 52A provides flow cytometry histograms showing that mAb-7 treatment mimicked SCF withdrawal and led to proliferation arrest in CD34+HSPCs as measured by cell-trace violet dye dilution. Cell-trace violet dye was used to measure cell proliferation. FIG. 52B provides flow cytometry contour plots showing a gating strategy to identify live, early apoptotic, and late apoptotic cells based on Annexin V and 7-AAD staining. FIG. 52C provides a plot of aggregated data showing frequency of live, apoptotic, and necrotic cells and demonstrating that mAb-7 treatment led to dose-dependent apoptosis in unedited HSPCs.

[0509] FIGS. 53A-53E provide a schematic diagram and bar graph showing engraftment of HSPCs base edited using the guide CC128 and the base editor ABE8.8 following anti-CD117 mAb-based conditioning. FIG. 53A provides a schematic diagram showing the design of the in vivo experiment to which the data of FIGS. 53B-53E corresponds. FIG. 53B provides bar graphs showing enrichment of CD117 (CC128) and HBG1/2 base editing in group 2 mice, which indicated engraftment of multiplex edited cells in mice treated with mAb-7. The isotype control group (group 1) showed absence of marrow editing. In FIG. 53B, each grouping of 5 bars represent, from left-to-right, bulk BM, hCD15, hCD19, Lin−CD34+, and GlyA. FIG. 53C provides bar graphs showing high human chimerism in an mAb-7 treated group that received a transplant of multiplex edited cells (group 2), in bulk bone marrow (Top panel) and Lin−CD34+ (Bottom panel) compartments. FIG. 53D provides a bar graph showing depletion of HPSCs expressing WT-CD117 and enrichment of base edited HSPCs (CC128) in bone marrow. FIG. 53E provides a bar graph presenting results from a receptor occupancy assay showing occupied receptors on unedited human HSPCs in mouse bone marrow following mAb treatment. The transplant dosing groups 1 and 2 of FIGS. 53B-53E are described in Table 19.

[0510] FIG. 54 provides plots showing kinetics for binding of ABTx052 and the VH_E107D (ABTx181) variant of ABTx052 to wild-type CD117.

[0511] FIGS. 55A-55C provide plots showing kinetics for binding of ABTx052 and each of the antibodies listed in Table 21 to wild-type CD117 (FIG. 55A), to the CC128 variant of CD117 (FIG. 55B), and to the CC200 variant of CD117 (FIG. 55C). The CC200 and CC128 variants of CD117 were prepared by base editing cells using the guide CC200 or CC128, respectively, and an adenosine deaminase base editor (ABE). In each of FIGS. 55A-55C, the y-axis represents antibody binding to CD117 in nanomolar, and the x-axis represents time. The first vertical line from the left in each of FIGS. 55A-55C represents the time at which CD117 was first contacted with a solution containing the indicated antibody, and the second vertical line from the left represents the time at which the solution in contact with CD117 was replaced with a solution free of any antibody.

[0512] FIG. 56 provides a plot similar to those of FIGS. 55A-55C showing kinetics for binding of ABTx052 to wild-type CD117, to the CC128 variant of CD117, and to the CC200 variant of CD117.

[0513] FIGS. 57A-57L provide plots similar to those of FIGS. 55A-55C showing kinetics for binding of ABTx248 (FIG. 57A), ABTx253 (FIG. 57B), ABTx271 (FIG. 57C), ABTx273 (FIG. 57D), ABTx250 (FIG. 57E), ABTx251 (FIG. 57F), ABTx274 (FIG. 57G), ABTx265 (FIG. 57H), ABTx268 (FIG. 57I), ABTx270 (FIG. 57J), ABTx256 (FIG. 57K), and ABTx272 (FIG. 57L) to wild-type CD117, to the CC128 variant of CD117, and to the CC200 variant of CD117.

[0514] FIGS. 58A-58D provide plots similar to those of FIGS. 55A-55C showing kinetics for binding of ABTx052 (FIG. 58A), ABTx248 (FIG. 58B), ABTx253 (FIG. 58C), and ABTx271 (FIG. 58D), to wild type CD117 at different antibody concentrations, where each curve of each plot represents a different antibody concentration. The following antibody concentrations were evaluted: 333.3 nM, 166.7 nM, 83.3 nM, 41.6 nM, 20.8 nM, 10.4 nM, and 5.2 nM.

[0515] FIG. 59 provides a plot showing EC50 values for the indicated antibodies when administered to M07e cells. In FIG. 59, “MFI” indicates “mean fluorescence intensity.”

[0516] FIG. 60 provides melt curves for the antibodies ABTx248, ABTx253, ABTx271, and ABTx052 showing that the ABTx247, ABTx253, and ABTx271 antibodies had Tms that were comparable to those of ABTx052.

[0517] FIG. 61 provides a plot showing that the antibodies ABTx248, ABTx253, and ABTx271 has low polyspecificity.

[0518] FIG. 62 provides a plot showing that hematopoietic stem cells (HSCs) contacted with increasing concentrations of the antibody ABTx052, ABTx167, ABTx248, ABTx135, ABTx253, or ABTx271 showed reductions in viability. Unedited HSCs were treated with the indicated monoclonal antibodies for 5-7 days. The media used was StemSpan™ SFEM II+Glutamax+100 ng/mL+Pen/Strep with 100 ng/mL SCF. Cells cultured without SCF was used as a reference.

[0519] FIG. 63 provides a schematic diagram showing two dosing paradigms used for transplantation of CD117 edited hematopoietic stem cells (HSCs) into humanized NBSGW mice following administration of an anti-CD117 monoclonal antibody (ABTx135). The groups of mice treated according to Dosing Paradigm A or Dosing Paradigm B are described in Tables 26 and 27, respectively. In FIG. 63, “CD117 edited” indicates that the cells were edited using the base editor ABE8.8 in combination with sgRNA CC128 (gRNA434).

[0520] FIGS. 64A-64G provide a series of bar graphs. FIG. 64A provides a bar graph showing chimerism observed in mice treated according to Dosing Paradigm A (see FIG. 63) at 4 weeks following administration of 1e6 CD34+ cells from Donor A and prior to administration of the monoclonal antibody ABTx135. FIGS. 64B-64G providing bar graphs showing chimerism (FIG. 64B) as well as frequencies of the cell types Lin−CD34+CD117+ (FIG. 64C), Lin−CD34+ (FIG. 64D), CD34+ (FIG. 64E), CD15+ (FIG. 64F), and GlyA+ (FIG. 64G) at 2 weeks post-monoclonal antibody administration. As a control, mice were administered an isotype antibody that does not bind CD117.

[0521] FIGS. 65A and 65B provide bar graphs showing observed levels of target editing of a CD117 polynucleotide (FIG. 65A) and/or an HBG1/2 promoter region (FIG. 65B) in bulk bone marrow (BM), hCD15+ cells, hCD19+ cells, Lin−CD34+ cells, and GlyA+ cells in mice treated according to Dosing Paradigm B of FIG. 63 at 10 weeks post monoclonal antibody administration. In FIGS. 65A and 65B, each grouping of five bars corresponds, from left-to-right, to “Bulk BM,” “hCD15,” “hCD19,” “Lin−CD34+,” and “GlyA.” The four groups indicated along the x-axis of FIGS. 65A and 65B correspond, respectively, to Groups 1˜4 of Table 27.

[0522] FIGS. 66A-66C provide bar graphs showing levels of chimerism (FIG. 66A), Lin−CD34+ cells (FIG. 66B), and CD34+ cells (FIG. 66C) in mice treated according to Dosing Paradigm B of FIG. 63 at 10 weeks post monoclonal antibody administration. In FIGS. 66A-66C, Groups 1B, 2B, 3B, and 4B, correspond to Groups 1, 2, 3, and 4 of Table 27, respectively.

[0523] FIGS. 67A-67D provide bar graphs showing levels of CD19+ cells (FIG. 67A), CD15+ cells (FIG. 67B), GlyA+ cells (FIG. 67C), and CD33+ cells (FIG. 67D) in mice treated according to Dosing Paradigm B of FIG. 63 at 10 weeks post monoclonal antibody administration. In FIGS. 67A-67C, Groups 1B, 2B, 3B, and 4B, correspond to Groups 1, 2, 3, and 4 of Table 27, respectively.

[0524] FIG. 68 provides a bar graph showing levels of Lin−CD34+CD117+ cells expressing wild type CD117 or edited CD117 in mice treated according to Dosing Paradigm B of FIG. 63 at weeks post monoclonal antibody administration. In FIG. 68 Groups 1, 2, 3, and 4 correspond to Groups 1, 2, 3, and 4 of Table 27, respectively.

[0525] FIG. 69 provides a schematic diagram showing two dosing paradigms used for transplantation of CD117 edited hematopoietic stem cells (HSCs) into NSG-SGM3 mice expressing human stem cell factor (SCF). The groups of mice treated according to the protocol described in FIG. 69 are described in Table 69.

[0526] FIGS. 70A-70C provide bar graphs showing levels of target base editing observed in the bulk bone marrow of mice treated according to the method of FIG. 69 at 4 weeks post hCD34+ cell transplantation. FIG. 70A provides a bar graph showing levels of editing observed at a CD117 polynucleotide target site corresponding to the guide polynucleotide CC128. FIG. 70B provides a bar graph showing levels of editing observed at a CD117 polynucleotide target site corresponding to the guide polynucleotide CC200. FIG. 70C provides a bar graphs showing levels of editing observed at a HBG1/2 promoter target site corresponding to the guide CC200. The groups indicated along the x-axis of FIGS. 70A-70C correspond, respectively, to Groups 1˜4 of Table 69.

[0527] FIGS. 71A-71F provide bar graphs showing levels of chimerism (FIG. 71A), Lin−CD34+ cells (FIG. 71B), CD34+ cells (FIG. 71C), CD19+ cells (FIG. 71D), CD15+ cells (FIG. 71E), and CD33+ cells (FIG. 71F) in mice treated according to the method of FIG. 69 at 4 weeks post hCD34+ cell transplant. The groups indicated along the x-axis of FIGS. 71A-71F correspond, respectively, to Groups 1˜4 of Table 69.

[0528] FIGS. 72A and 72B provide plots showing kinetics for binding of variants of ABTx025 to wild-type CD117 (Wt CD117) (FIG. 72A) and to the CD117 variant CC128 (FIG. 72B) expressed from a polynucleotide prepared by base editing a polynucleotide encoding wild-type CD117 using a base editor system containing the guide polynucleotide CC128 and an adenosine deaminase base editor (ABE). In each of FIGS. 72A and 72B, the y-axis represents antibody binding in nanomolar and the x-axis represents time. The first vertical line from the left in each of FIGS. 72A and 72B represents the time at which CD117 was first contacted with a solution containing an antibody, and the second vertical line from the left represents the time at which the solution in contact with CD117 was replaced with a solution free of any antibody.

[0529] FIGS. 73A-73E provide plots showing kinetics for binding of variants of ABTx025 to wild-type CD117 (Wt CD117) (FIG. 72A). In each of FIGS. 73A-73E, the y-axis represents antibody binding in nanomolar and the x-axis represents time. In each of FIGS. 73A-73E, the vertical line represents the time at which the solution in contact with CD117 was replaced with a solution free of any antibody. The first vertical line from the left in each of FIGS. 73A-73E represents the time at which CD117 was first contacted with a solution containing the indicated antibody, and the second vertical line from the left represents the time at which the solution in contact with CD117 was replaced with a solution free of any antibody. The plots of FIGS. 73A-73E show the off rates for the indicated antibodies. Each line of the plots of FIGS. 73A-73E corresponds to a different concentration of CD117.

[0530] FIGS. 74A and 74B provide melt curves for the indicated antibodies. FIG. 74B plots the derivative of the melt curves shown in FIG. 74A.

[0531] FIG. 75 provides a plot showing that the indicated antibodies had low polyspecificity.

[0532] FIGS. 76A and 76B show binding of the indicated antibodies to M07e cells expressing wild type CD117 (FIG. 76A) or a CC128 variant of CD117 (FIG. 76B). The plots allow for the determination of an effective concentration 50% (EC50) value for the binding of each antibody to the indicated cells. The cells were stained using the indicated antibodies as the primary antibody and a secondary antibody containing the fluorophore AF647.

[0533] FIG. 77 provides a plot showing that the antibodies ABTx196 and ABTx198 were able to efficiently deplete human CD34+HSPCs at efficiencies comparable to those for the antibody ABTx135. The horizontal line in FIG. 77 corresponds to the viability of cells grown in the absence of SCF.

[0534] FIGS. 78A-78D providing size exclusion chromatography-high performance liquid chromatography (SEC-HPLC) plots showing the purity of ABTx307, ABTx308, ABTx309, and ABTx313 antibodies isolated from host cells.

[0535] FIG. 79 provides images of reducing and non-reducing SDS PAGE gels run to evaluate purified ABTx307, ABTx308, ABTx309, and ABTx313 antibodies.

[0536] FIGS. 80A and 80B provide melt curves for the indicated antibodies. FIG. 80B plots the derivative of the melt curves shown in FIG. 80A.

[0537] FIGS. 81A and 81B provide plots showing polyspecificity levels for each of the indicated antibodies as evaluated using a 1:200 baculovirus particles (BVP) coating (FIG. 81A) and a 1:500 BVP coating (FIG. 81B).

[0538] FIGS. 82A-82E provide plots showing KD measurements for ABTx307 (FIG. 82A), ABTx308 (FIG. 82B), ABTx309 (FIG. 82C), ABTx313 (FIG. 82D), and ABTx135 (FIG. 82E). KD measurements were collected using Anti-Human IgG Fc Capture (AHC) biosensors to capture 100 nM of each monoclonal antibody followed by incubation with a 1:2 titration series of a wild type CD117 extracellular domain (ECD) protein with an undiluted concentration of 345 nM. The AHC biosensor data was analyzed using Octet Analysis Studio software.

[0539] FIGS. 83A-83E provide plots showing binding to the CC128 variant of CD117 for ABTx307 (FIG. 83A), ABTx308 (FIG. 83B), ABTx309 (FIG. 83C), ABTx313 (FIG. 83D), and ABTx135 (FIG. 83E). Binding to the CC128 variant of CD117 was determined using streptavidin (SA) biosensors, which were allowed to bind the CC128 variant from a 5 μg/ml solution thereof. The SA biosensors were then titrated with monoclonal antibodies starting at 2.5 μM and using titration increments of 1:2. Data was analyzed using the Octet Analysis Studio Software.

[0540] FIG. 84 provides plots showing binding to wild type CD117 and the CC128 variant of CD117 for ABTx135, ABTx309, ABTx307, ABTx313, and ABTx308. Binding to the CC128 variant of CD117 or to wild type CD117 was determined using streptavidin (SA) biosensors, which were allowed to bind the CD117 polypeptide from a 5 μg/ml solution thereof. The SA biosensors were then incubated with 100 nM of the indicated antibodies. Data was analyzed using the Octet Analysis Studio Software.

[0541] FIG. 85 provides a plot showing binding of ABTx308 and ABTx253 to the CC128 variant of CD117. Binding to the CC128 variant of CD117 was determined using streptavidin (SA) biosensors, which were allowed bind the CC128 variant from a 5 μg/ml solution thereof. The SA biosensors were then incubated with 100 nM of the indicated antibodies. Data was analyzed using the Octet Analysis Studio Software.

[0542] FIG. 86A-86D provide plot comparing binding to the CC128 variant of CD117 by ABTx307 (FIG. 86A), ABTx308 (FIG. 86B), ABTx309 (FIG. 86C), and ABTx313 (FIG. 86D) to ABTx135. Binding to the CC128 variant of CD117 was determined using streptavidin (SA) biosensors, which were allowed to bind the CC128 variant from a 5 μg/ml solution thereof. The SA biosensors were then incubated with 100 nM of the indicated antibodies. Data was analyzed using the Octet Analysis Studio Software.

[0543] FIGS. 87A and 87B provide plots showing binding of M07e cells expressing wild type CD117 (FIG. 87A) and of M07e cells expressing a CC128 variant of CD117 (FIG. 87B) by ABTx307, ABTx308, ABTx308, ABTx313, and ABTx135. The indicated monoclonal antibodies were incubated with the cells for 1 hour. The chart of FIG. 87A provides a summer of the EC50 (nM) values calculated for each antibody from the plot of FIG. 87A.

[0544] FIG. 88 provides a plot showing that the antibodies ABTx307, ABTx308, ABTx309, and ABTx313 were able to efficiently deplete human CD34+HSPCs. The horizontal line in FIG. 77 corresponds to the viability of cells grown in the absence of SCF.

[0545] FIG. 89 provides a ribbon diagram showing a cryo-EM structure of a CD117: ABTx052 complex. The CD117 domains D1, D2, and D3 are shown in different shades of grey, and the antibody ABTx052 is shown in darker shades of grey to the right of the CD117 domains in FIG. 89. The CD117 domains D4 and D5 were excluded from the structure due to the lack of an interpretable cryo-EM density map. The CD117 residues [D72 and T74 (domain D1); D121, R122, Y125, R181, and K203 (domain D2); and S240, E257, Y259, S261, and H263 (domain D3)] that interact with ABTx052 are shown as spheres.

[0546] FIG. 90 provides a ribbon diagram showing a cryo-EM structure of a CD117: SCF complex. The superposition between CC128: SCF (CC128-arrows/beta pleated sheets shown in lighter shades of grey, SCF-spirals/alpha helices shown in darker shades of grey; CC128 domains D5 and D5′ were excluded from the structure due to the lack of interpretable cryo-EM density map) and CD117: SCF (CD117, SCF; PDB Accession No. 2E9W) tetrameric structures revealed high structural similarity, with an RMSD of 0.848-Å for all of the Ca atoms. This high structural similarity between these complexes of CD117 and CC128 with SCF showed that the CC128-Y259C—N260D substitutions did not affect the protein structure and, consequently, its function in binding SCF.

### DETAILED DESCRIPTION

[0547] The disclosure features compositions and methods for non-genotoxic monoclonal antibody (mAb) conditioning, where the methods involve altering a cluster of differentiation 117 (CD117; c-KIT) polynucleotide sequence in a hematopoietic stem cell (HSC) or progenitor thereof to encode a CD117 polypeptide with reduced binding to the antibody. In various embodiments, the methods further include introducing a therapeutic alteration to a gene of the HSC or progenitor thereof for treatment of a hemoglobinopathy (e.g., sickle cell disease).

[0548] The embodiments of the disclosure are based, at least in part, upon the development of a non-genotoxic, busulfan-free, conditioning approach that combines a non-genotoxic conditioning strategy with a gene editing strategy for the treatment of sickle cell disease. The embodiments of the disclosure were developed with the goal, among others, of reducing challenges associated with the standard of care conditioning regimen (see, e.g., FIG. 47). The non-genotoxic conditioning efforts aimed to leverage base editing technologies to engineer hemopoietic stem cells (eHSCs) that can be coupled with a monoclonal antibody (mAb) reagent capable of conditioning a patient prior to transplantation. Through base editing, an engineered stem cell antibody paired evasion, or “ESCAPE”, approach was developed that enables the engineered HSCs to be resistant to mAb still present in the system and/or allows the ability to administer a second dose of the mAb after administration of the HSCs. In embodiments, the engineered hematopoietic stem cells (eHSCs) can selectively escape ablation and be engineered to contain base edits in the promoter region of the HBG1/2 gene and/or to contain a Makassar alteration to a pathogenic beta globin gene, towards a potential treatment of sickle cell disease.

[0549] The methods described herein provide for the selective targeting of endogenous HSCs, while sparing edited HSCs. Accordingly, antibody or antibody-drug conjugate (ADC) treatment used for conditioning prior to hematopoietic stem cell transplantation (HSCT) can continue to be administered following HSCT to expand gene edited cells in vivo or treat malignant disease with repeated dosing. This minimizes the risk of killing edited cells. Edited cells would allow for the administration of antibody or ADC without Fc modifications to reduce their half-life. This has the potential to enable the use of antibodies with longer half-lives and simplify the development of ADCs. Clinical trial design is also simplified-HSCs could be infused prior to or concurrently with conditioning with little or no risk of being depleted. The methods provide a benefit for all patients regardless of immune status.

[0550] In one embodiment, CD117 is altered (e.g., using base editing) in a cell for transplantation to prevent binding of anti-CD117 antibody, but not interfere with normal SCF signaling. Using base editing, a nucleobase change may be generated to create an amino acid substitution in CD117. Stem cell factor (SCF) drives HSC self-renewal and differentiation into progenitor cells. Administering anti-CD117 antibody blocks SCF binding to CD117, thereby depleting HSCs and progenitor cells in the patient (conditioning). Autologous gene edited HSCs are transplanted into the patient. Gene-edited cells compete with residual host HSCs to repopulate bone marrow (BM). Anti-CD117 antibody blocks SCF binding to wildtype (WT) CD117 but cannot bind to HSCs with an edited CD117. Thus, native, wild type HSCs are targeted by anti-CD117 antibody, but gene edited HSCs are not. Thus, both cells express CD117 polypeptides that are activated by SCF binding. However, binding of anti-CD117 antibody to wild type CD117 disrupts SCF binding and results in inhibition of SCF signaling wild type cells. In contrast, gene-edited HSCs are refractory to anti-CD117 antibody because the amino acid substitution introduced in CD117 prevents the binding of anti-CD117 antibody but does not interfere with normal SCF binding and signaling.

[0551] In embodiments, the methods of the disclosure enable a reduction or elimination of use of alkylating agents for conditioning. In some instances, the reduction is a reduction of about, or at least about, 5%, 10%, 15%, 20%, 25%, 30%, 35%, 40%, 45%, 50%, 55%, 60%, 65%, 70%, 75%, 80%, 85%, 90%, 95%, or 100%. In some instances, the methods of the disclosure are associated with a reduction in or avoidance of side effects associated with an alkylating agent (e.g., busulphan). In some cases, the side effect is selected from one or more of intestinal mucosal damage, alopecia, pancytopenia, anemia, amenorrhea, impaired spermatogenesis, increased risk of malignancy, and infertility.

[0552] Exemplary, yet nonlimiting, examples of compositions and methods for treating hemoglobinopathies are described in International Publications No. WO2021041945, WO2020168133, WO 2019/217942, and WO2019079347, which are incorporated herein by reference in their entireties for all purposes.

### Cluster of Differentiation 117 (Cd117; C-Kit)

[0553] CD117 is expressed in hematopoietic stem cells (HSCs) and is critical for their self-renewal, survival & differentiation. Upon differentiation, CD117 expression is lost. Mature mast cells retain CD117 expression. High level of expression the long term and short-term HSCs make CD117 an attractive target for immunologic conditioning.

[0554] Therefore, one approach to eliminate hematopoietic stem cells from a niche is to contact the cells with an anti-CD117 antibody that interferes with proper functioning of the CD117 polypeptide (e.g., blocks binding to SCF). Accordingly, CD117/c-KIT is a target for hematopoietic stem cell transplantation (HSCT) antibody-based conditioning. Non-limiting examples of antibodies suitable for use in the methods of the disclosure include ABTx052, ABTx062, ABTx025, ABTx030, ABTx070, ABTx071, JSP191, and MGTA-117. In some embodiments, the antibody is selected from one or more of ABTx025, ABTx030, ABTx052, ABTx061, ABTx062, ABTx070, ABTx071, ABTx196, ABTx198, ABTx202, ABTx203, ABTx205, ABTx206, ABTx248, ABTx250, ABTx251, ABTx253, ABTx254, ABTx255, ABTx256, ABTx265, ABTx268, ABTx270, ABTx271, ABTx272, ABTx273, ABTx274, ABTx307, ABTx308, ABTx309, and ABTx313.

[0555] Critical events in the DCD117 life cycle include SCF binding, CD117 homo-dimerization, trans-phosphorylation of tyrosine residues, ubiquitinization, internalization, and proteolytic degradation. Trans-phosphorylation of the tyrosine residues is associated with cell activation and downstream phosphorylation, calcium mobilization, and cell migration.

### HBB Gene Editing

[0556] As described herein, the compositions and methods of the disclosure are useful and advantageous for the treatment of sickle cell disease (SCD), which is caused by a Glu→Val mutation at the sixth amino acid of the β-globin protein encoded by the HBB gene. Despite many developments to date in the field of gene editing, precise correction of the diseased HBB gene to revert Val→Glu is presently not achievable using either CRISPR/Cas nuclease or CRISPR/Cas base editing approaches.

[0557] Genome editing of the HBB gene to replace the affected nucleotide using a CRISPR/Cas nuclease approach requires cleavage of genomic DNA. However, cleavage of genomic DNA carries an increased risk of generating base insertions/deletions (indels), which have the potential to cause unintended and undesirable consequences, including generating premature stop codons, altering the codon reading frame, etc. Furthermore, generating double-stranded breaks at the β-globin locus has the potential to radically alter the locus through recombination events. The β-globin locus contains a cluster of globin genes having sequence identity to one another -5′-ε-; Gγ-; Aγ-; δ-; and β-globin-3′. Because of the structure of the β-globin locus, recombination repair of a double-stranded break within the locus has the potential to result in gene loss of intervening sequences between globin genes, for example between δ- and β-globin genes.

[0558] Unintended alterations to the locus also carry a risk of causing thalassemia.

[0559] CRISPR/Cas base editing approaches hold promise in that they have the ability to generate precise alterations at the nucleobase level. However, precise correction of Val→Glu (GTG→GAG) requires a T·A to A·T transversion editor, which is not presently known to exist. Additionally, the specificity of CRISPR/Cas base editing is due in part to a limited window of editable nucleotides created by R-loop formation upon CRISPR/Cas binding to DNA. Thus, CRISPR/Cas targeting must occur at or near the sickle cell site to allow base editing to be possible, and there may be additional sequence requirements for optimal editing within the window. One requirement for CRISPR/Cas targeting is the presence of a protospacer-adjacent motif (PAM) flanking the site to be targeted. For example, many base editors are based on SpCas9 which requires an NGG PAM. Even assuming hypothetically that an T·A to A·T transversion were possible, no NGG PAM exists that would place the target “A” at a desirable position for such an SpCas9 base editor. Although many new CRISPR/Cas proteins have been discovered or generated that expand the collection of available PAMs, PAM requirements remain a limiting factor in the ability to direct CRISPR/Cas base editors to specific nucleotides at any location in the genome.

[0560] The present disclosure is based, at least in part, on several discoveries described herein that address the foregoing challenges for providing a genome editing approach for treatment of sickle cell anemia. In one aspect, the embodiments of the disclosure are based in part on the ability to replace the valine at amino acid position 6, which causes sickle cell disease, with an alanine, to thereby generate an Hb variant (Hb Makassar) that does not generate a sickle cell phenotype. While precise correction (GTG→GAG) is not possible without a T·A to A·T transversion base editor, the studies performed herein have found that a Val→Ala (GTG→GCG) replacement (i.e., the Hb Makassar variant) can be generated using an A·T to G·C base editor (ABE). In some embodiments, the methods of the disclosure involve detecting an Hb Makassar variant using an antibody, such as an antibody selected from those described in U.S. Provisional Patent Application No. 63/329,109, filed Apr. 8, 2022. This was achieved in part by the development of novel base editors and novel base editing strategies, as provided herein. For example, novel ABE base editors (i.e., having an adenosine deaminase domain) that utilize flanking sequences (e.g., PAM sequences; zinc finger binding sequences) for optimal base editing at the sickle cell target site.

[0561] Thus, the present disclosure includes compositions and methods for base editing a thymidine (T) to a cytidine (C) in the codon of the sixth amino acid of a sickle cell disease variant of the β-globin protein (Sickle HbS; E6V), thereby substituting an alanine for a valine (V6A) at this amino acid position. Substitution of alanine for valine at position 6 of HbS generates a β-globin protein variant that does not have a sickle cell phenotype (e.g., does not have the potential to polymerize as in the case of the pathogenic variant HbS). Accordingly, the compositions and methods of the disclosure are useful for the treatment of sickle cell disease (SCD).

HBG1 and/or HBG2 Promoter Editing

[0562] Sickle cell disease (SCD) affects approximately 100,000 patients in the United States. Individuals carrying both the SCD mutation and mutations that cause persistence of fetal hemoglobin (HPFH) do not typically present with sickle cell pathologies due to persistent fetal hemoglobin (HbF) levels. Higher HbF levels correlate with greater benefit for individuals with blood disease, such as reduction in disease symptoms and improved overall health. A T to C mutation at the −198 position in the HBG promoter causes HPFH by interference of binding to γ-globulin repressor proteins, such as BCL11A.

[0563] Ex vivo manipulation and/or editing of HSCs prior to administration to patients as a cell therapy is a promising approach for the treatment of hematological disorders. ABEs can introduce a T to C substitution at the −198 position of the promoter region of HBG1/2 (Gaudelli, N. M. et al. Programmable base editing of A*T to G*C in genomic DNA without DNA cleavage. Nature 551, 464-471, doi: 10.1038/nature24644 (2017)). This naturally occurring allele yields Hereditary Persistence of Fetal Hemoglobin (HPFH) resulting in increased levels of γ-globin into adulthood, which can mitigate the defects in β-globin seen in sickle cell disease and β-thalassemia (Wienert, B. et al. KLF1 drives the expression of fetal hemoglobin in British HPFH. Blood 130, 803-807, doi: 10.1182/blood-2017-02-767400 (2017)). Base editor systems have been developed that significantly increase the level of HbF following nucleotide conversion at key regulatory motifs within the HBG1 and HBG2 (HBG1/2) promoters.

[0564] Increasing levels of HbF expression leads to protection to the majority of SCD and β-thalassemia patients based on clinical observations of HPFH and non-interventional therapy that links higher HbF dosage with milder disease (Ngo et al., 2011 Brit J Hem, Vol. 156 (2): 259-264; Musallam et al., 2012 Blood). Accordingly, in the HPFH approach described here, base editing is used to recreate single base changes in the regulatory region of both gamma globin genes (HBG1 and HBG2) that disrupt repressor binding and lead to increased expression of fetal hemoglobin (HbF). Beta-thalassemia or sickle cell disease patients naturally harboring these variants are often asymptomatic or experience a milder form of the disease.

[0565] An exemplary target sequence for introducing an alteration to an HBG1/2 promoter to increase expression of fetal hemoglobin is provided below:

[0566] The target sequence, including edited bases 5 and 8 (in bold) and PAM (SEQ ID NO: 503):

| 1 | 2 | 3 | 4 | 5 | 6 | 7 | 8 | 9 | 10 | 11 | 12 | 13 | 14 | 15 | 16 | 17 | 18 | 19 | 20 | PAM |
|---|---|---|---|---|---|---|---|---|---|---|---|---|---|---|---|---|---|---|---|---|
| C | T | T | G | A | C | C | A | A | T | A | G | C | C | T | T | G | A | C | A | AGG |

### Methods of Treatment

[0567] The methods and compositions disclosed herein may be used to condition a subject's tissues (e.g., bone marrow) for engraftment or transplant and following such conditioning, a stem cell population is administered to the subject. The transplanted cells (e.g., HSCs) can be autologous cells or allogeneic cells. In certain aspects, the stem cell population comprises an exogenous stem cell population. In some embodiments, the stem cell population comprises the subject's endogenous stem cells (e.g., endogenous stem cells that have been genetically modified to correct a disease or genetic defect, such as those associated with sickle cell disease). Such methods and compositions may be useful for treating such diseases without causing the toxicities that are observed in response to traditional conditioning therapies, such as irradiation.

[0568] Hematopoietic stem cell transplant therapy can be administered to a subject in need of treatment so as to populate or re-populate one or more blood cell types. Hematopoietic stem cells generally exhibit multi-potency, and can thus differentiate into multiple different blood lineages including, but not limited to, granulocytes (e.g., promyelocytes, neutrophils, eosinophils, basophils), erythrocytes (e.g., reticulocytes, erythrocytes), thrombocytes (e.g., megakaryoblasts, platelet producing megakaryocytes, platelets), monocytes (e.g., monocytes, macrophages), dendritic cells, microglia, osteoclasts, and lymphocytes (e.g., NK cells, B-cells and T-cells). Hematopoietic stem cells are additionally capable of self-renewal and can thus give rise to daughter cells that have equivalent potential as the mother cell, and also feature the capacity to be reintroduced into a transplant recipient whereupon they home to the hematopoietic stem cell niche and re-establish productive and sustained hematopoiesis.

[0569] Hematopoietic stem cells can thus be administered to a patient defective or deficient in one or more cell types of the hematopoietic lineage in order to reconstitute the defective or deficient population of cells in vivo, thereby treating the pathology associated with the defect or depletion in the endogenous blood cell population. The compositions and methods described herein can thus be used to treat a non-malignant hemoglobinopathy (e.g., a hemoglobinopathy selected from the group consisting of sickle cell anemia, thalassemia, Fanconi anemia, aplastic anemia, and Wiskott-Aldrich syndrome). Additionally, or alternatively, the compositions and methods described herein can be used to treat a malignancy or proliferative disorder, such as a hematologic cancer, myeloproliferative disease. In the case of cancer treatment, the compositions and methods described herein may be administered to a patient so as to deplete a population of endogenous hematopoietic stem cells prior to hematopoietic stem cell transplantation therapy, in which case the transplanted cells can home to a niche created by the endogenous cell depletion step and establish productive hematopoiesis. This, in turn, can re-constitute a population of cells depleted during cancer cell eradication, such as during systemic chemotherapy. Exemplary hematological cancers that can be treated using the compositions and methods described herein include, without limitation, acute myeloid leukemia, acute lymphoid leukemia, chronic myeloid leukemia, chronic lymphoid leukemia, multiple myeloma, diffuse large B-cell lymphoma, and non-Hodgkin's lymphoma, as well as other cancerous conditions, including neuroblastoma.

[0570] Antibodies, antigen-binding fragments thereof, and ligands described herein can be administered to a patient (e.g., a human patient suffering from cancer, an autoimmune disease, or in need of hematopoietic stem cell transplant therapy) in a variety of dosage forms. For instance, antibodies, antigen-binding fragments thereof, and ligands described herein can be administered to a patient suffering from cancer, an autoimmune disease, or in need of hematopoietic stem cell transplant therapy in the form of an aqueous solution, such as an aqueous solution containing one or more pharmaceutically acceptable excipients. Pharmaceutically acceptable excipients for use with the compositions and methods described herein include viscosity-modifying agents. The aqueous solution may be sterilized using techniques known in the art. Non-limiting examples of antibodies suitable for use in the methods of the disclosure include ABTx025, ABTx030, ABTx052, ABTx061, ABTx062, ABTx070, ABTx071, JSP191, and MGTA-117. Further non-limiting examples of anti-CD117 antibodies useful in embodiments of the methods of the disclosure include 1C5, 2B8, 104D2, ACK2, JSP191, K45, Y45.B8, ST04-99, 22HCLC, G.813.2, 8D7, ACK4, 2B8/BM, OTI2B12, OTI1B6, OTI2E3, OTI1E2, OTI2CID5, OTI3F9, OTI9A11, OTI14B1, 6F2, UMAB216, OTI2B5, OTI1F6, OTI2C1H4, OTI6F8, and derivatives thereof available, for example, from ThermoFisher Scientific.

[0571] In various embodiments, an antibody of the disclosure is administered to a subject before, after, or concurrently with administration of transplanted cells (e.g., HSCs) to the subject. In embodiments, the methods of the disclosure involve administering cells (e.g., HSCs of the disclosure) to a subject previously that was previously administered an anti-CD117 antibody of the disclosure. In some cases, the blood of the subject contains a therapeutically effective amount of the anti-CD117 antibody at the time at which the cells are administered to the subject. The antibody of the disclosure may persist at a therapeutically effective level in a subject (e.g., in the blood of the subject) for about or at least about 1 day, 2 days, 3 days, 4 days, 5 days, 6 days, 7 days, 8 days, 1 wk, 2 wks, 3 wks, 4 wks, 5 wks, 10 wks, 15 wks, or 20 wks after administration of the antibody to the subject. An antibody or antigen binding fragment thereof, antibody drug conjugate, or a chimeric antigen receptor T (CAR-T) cell may be administered to a subject before, after, or concurrently with a edited cell of the disclosure.

[0572] IgG1 antibodies targeting CD117 can cause mast cell degranulation, which can result from Fcγ receptor interactions. Accordingly, in some embodiments an antibody (e.g., ABTx052) can be modified to include one or more amino acid residue alterations in an Fc domain to reduce or eliminate binding to FcγR, binding to FcRn, and/or mast cell activation. In embodiments, an antibody is modified to include amino acid alterations that prevent or reduce hypersensitivity reactions (HSRs). In some embodiments, an antibody (e.g., ABTx052) is modified to include an amino acid alteration at one or more of the following sites: L234, L235, G236, D265, N297, and P329. In some cases, the antibody includes an amino acid alteration and/or combination of amino acid alterations selected from: N297Q (aglycosylated); L234A and L235A (LALA); L234A, L235A, and P329G (LALAPG); L234A, L235A, and D265A (LALADA); L234S, L235T, and G236R (STR or LSLTGR); M252Y, S254T, and T256E (YTE); and LS M428L and N434S (LS) (see, e.g., Rosenberg, et al., PloS One, 14: e0212649, the disclosure of which is incorporated herein by reference in its entirety for all purposes); where the amino acid positions are referenced to the following amino acid sequence:

(positions 7-1101 of SEQ ID NO: 419)
SGAAVKKPGESLKISCKGSGYRFTSYWIGWVRQMPGKGLEWMGIIYPGDS
DTRYSPSFQGQVTISAGKSISTAYLOWSSLKASDTAMYYCARHGRGYNGY
EGAFDIWGQGTMVTVSSASTKGPSVFPLAPSSKSTSGGTAALGCLVKDYF
PEPVTVSWNSGALTSGVHTFPAVLQSSGLYSLSSVVTVPSSSLGTQTYIC
NVNHKPSNTKVDKKVEPKSCDKTHTCPPCPAPELLGGPSVFLFPPKPKDT
LMISRTPEVTCVVVDVSHEDPEVKFNWYVDGVEVHNAKTKPREEQYNSTY
RVVSVLTVLHQDWLNGKEYKCKVSNKALPAPIEKTISKAKGQPREPQVYT
LPPSRDELTKNQVSLTCLVKGFYPSDIAVEWESNGQPENNYKTTPPVLDS
DGSFFLYSKLTVDKSRWQQGNVFSCSVMHEALHNHYTQKSLSLSPG.

[0573] The antibodies, antigen-binding fragments, and ligands described herein may be administered by a variety of routes, such as orally, transdermally, subcutaneously, intranasally, intravenously, intramuscularly, intraocularly, or parenterally. The most suitable route for administration in any given case will depend on the particular antibody, antigen-binding fragment, or ligand administered, the patient, pharmaceutical formulation methods, administration methods (e.g., administration time and administration route), the patient's age, body weight, sex, severity of the diseases being treated, the patient's diet, and the patient's excretion rate.

[0574] One of ordinary skill in the art would recognize that multiple administrations of the pharmaceutical compositions contemplated in particular embodiments may be required to affect the desired therapy. For example, a composition may be administered to the subject 1, 2, 3, 4, 5, 6, 7, 8, 9, or 10 or more times over a span of 1 week, 2 weeks, 3 weeks, 1 month, 2 months, 3 months, 4 months, 5 months, 6 months, 1 year, 2 years, 5, years, 10 years, or more.

[0575] Administration of the pharmaceutical compositions contemplated herein may be carried out using conventional techniques including, but not limited to, infusion, transfusion, or parenterally. In some embodiments, parenteral administration includes infusing or injecting intravascularly, intravenously, intramuscularly, intraarterially, intrathecally, intratumorally, intradermally, intraperitoneally, transtracheally, subcutaneously, subcuticularly, intraarticularly, subcapsularly, subarachnoidly and intrasternally.

### Editing of Target Genes

[0576] To produce the gene edits described above, cells (e.g., hematopoietic stem cells (HSCs)) are contacted with one or more guide RNAs and a nucleobase editor polypeptide comprising a nucleic acid programmable DNA binding protein (napDNAbp) and an adenosine deaminase. In some cases, the cells are collected from a subject prior to the contacting. In some embodiments, the gRNA comprises nucleotide analogs. These nucleotide analogs can inhibit degradation of the gRNA from cellular processes. Tables 1 and 2 provides exemplary spacer sequences to be used for gRNAs. In some instances, a spacer sequence can be selected from those listed in Tables 1 and 2 or from a variant thereof with a truncation and/or extension (e.g., a 1, 2, 3, 4, 5, 6, 7, 8, 9, or 10 nucleotide 3′ and/or 5′ truncation and/or extension). In some instances, the gRNA is added directly to a cell.

[0577] Base editing can be carried out in vitro or in vivo. In some embodiments, cells (e.g., a hematopoietic stem cells (HSCs)) are collected from a subject or a donor. In some embodiments, base editing is carried out to induce changes in the genome of the cell. In some embodiments, base editing is carried out to induce changes in the genome of an allogeneic cell.

[0578] In some embodiments, cells of the present disclosure, are contacted with one or more guide RNAs and a nucleobase editor polypeptide comprising a nucleic acid programmable DNA binding protein (napDNAbp) (e.g., Cas9) domain and an adenosine deaminase domain. In some embodiments, the at least one nucleic acid molecule encoding one or more guide RNAs and a nucleobase editor polypeptide is delivered to cells by one or more vectors (e.g., AAV vector or lipid nanoparticle). In some cases, a guide RNA(s) and a nucleobase editor polypeptide is delivered to cells by electroporation.

[0579] The present disclosure provides one or more guide RNAs that direct a nucleobase editor polypeptide to edit a site in the genome of the cell (e.g., hematopoietic stem cell (HSC)). In some embodiments, the present disclosure provides guide RNAs that target a CD117 polynucleotide, a beta globin (HBB) polynucleotide, and/or a promoter region of a HBG1/2 polynucleotide. Exemplary guide RNA spacer sequences are provided in the below Tables 1 and 2.

[0580] In various instances, it is advantageous for a spacer sequence to include a 5′ and/or a 3′ “G” nucleotide. In some cases, for example, any spacer sequence or guide polynucleotide provided herein comprises or further comprises a 5′ “G”, where, in some embodiments, the 5′ “G” is or is not complementary to a target sequence. In some embodiments, the 5′ “G” is added to a spacer sequence that does not already contain a 5′ “G.” For example, it can be advantageous for a guide RNA to include a 5′ terminal “G” when the guide RNA is expressed under the control of a U6 promoter or the like because the U6 promoter prefers a “G” at the transcription start site (see Cong, L. et al. “Multiplex genome engineering using CRISPR/Cas systems. Science 339:819-823 (2013) doi: 10.1126/science.1231143). In some cases, a 5′ terminal “G” is added to a guide polynucleotide that is to be expressed under the control of a promoter but is optionally not added to the guide polynucleotide if or when the guide polynucleotide is not expressed under the control of a promoter.

TABLE 1
Guide RNAs sequences

| | | SEQ | | SEQ | | |
|---|---|---|---|---|---|---|
| | | ID | | ID | | |
| Guide No. | Spacer | NO: | Target Sequence | NO: | PAM | Mutations |
| Guide-CC1 | AUGAAACGAAUG | 504 | ATGAAACGAATGAGA | 703 | CAG | E73G |
| | AGAAUAAG | | ATAAG | | | T74A |
| | | | | | | N75D |
| Guide-CC2 | UGGAUGAAACGA | 505 | TGGATGAAACGAATG | 704 | AAG | D72G |
| | AUGAGAAU | | AGAAT | | | E73G |
| | | | | | | T74A |
| Guide-CC3 | GCCAGGGGAAGC | 506 | GCCAGGGGAAGCCTC | 705 | AAG | Q152R |
| | CUCUUCCC | | TTCCC | | | K154E |
| Guide-CC4 | UCUGUGUACUCA | 507 | TCTGTGTACTCAACG | 706 | AAG | Y243C |
| | ACGUGGAA | | TGGAA | | | |
| Guide-CC5 | UGUGUACUCAAC | 508 | TGTGTACTCAACGTG | 707 | GAG | Y243C |
| | GUGGAAAA | | GAAAA | | | |
| Guide-CC6 | GGGAAGAUUAUC | 509 | GGGAAGATTATCCCA | 708 | GAG | E360G |
| | CCAAGUCU | | AGTCT | | | D361G |
| Guide-CC7 | CCAGAAAUCCUG | 510 | CCAGAAATCCTGACT | 709 | CAG | E414G |
| | ACUUACGA | | TACGA | | | I415V |
| Guide-CC8 | UCUGAGAAUGAA | 511 | TCTGAGAATGAAAGT | 710 | CAG | E366G |
| | AGUAAUAU | | AATAT | | | N367G |
| Guide-CC9 | CUAUUUUAACUU | 512 | CTATTTTAACTTTGC | 711 | AAG | Y503C |
| | UGCAUUUA | | ATTTA | | | N505G |
| Guide- | UUCACGAGCCUG | 513 | TTCACGAGCCTGTCG | 712 | CAG | L421P |
| CC10 | UCGUAAGU | | TAAGT | | | V422A |
| Guide- | CAGCAGUGGAUC | 514 | CAGCAGTGGATCTAT | 713 | CAG | Q347R |
| CC11 | UAUAUGAA | | ATGAA | | | |
| Guide- | CAUUCCCCAAAC | 515 | CATTCCCCAAACCTG | 714 | CAG | K342E |
| CC12 | CUGAACAC | | AACAC | | | |
| Guide- | UAUCCCAAGUCU | 516 | TATCCCAAGTCTGAG | 715 | AAG | K364G |
| CC13 | GAGAAUGA | | AATGA | | | |
| Guide- | AUAAAUGGGAAG | 517 | ATAAATGGGAAGATT | 716 | AAG | K358G |
| CC14 | AUUAUCCC | | ATCCC | | | |
| Guide- | UCCCCAAACCUG | 518 | TCCCCAAACCTGAAC | 717 | CAG | K342G |
| CC15 | AACACCAG | | ACCAG | | | |
| Guide- | GCCAUUCACGAG | 519 | GCCATTCACGAGCCT | 718 | AAG | V422A |
| CC16 | CCUGUCGU | | GTCGT | | | |
| Guide- | AAAUGUCACAAC | 520 | AAATGTCACAACAAC | 719 | AAG | N300S |
| CC17 | AACCUUGG | | CTTGG | | | T302A |
| Guide- | CGUGGAAAAGAG | 521 | CGTGGAAAAGAGAAA | 720 | CAG | K247G |
| CC18 | AAAACAGU | | ACAGT | | | R248G |
| Guide- | CCAUUUGACAAA | 522 | CCATTTGACAAAGCC | 721 | CAG | V64A |
| CC19 | GCCCGGAU | | CGGAT | | | W66R |
| Guide- | AGCAAGCUAUCU | 523 | AGCAAGCTATCTTCT | 722 | AAG | S220G |
| CC20 | UCUUAGGG | | TAGGG | | | Y221C |
| Guide- | UGAGGUUUAUUC | 524 | TGAGGTTTATTCCTG | 723 | AAG | R161G |
| CC21 | CUGACCCC | | ACCCC | | | I163V |
| Guide- | UGAAUGGAUCAC | 525 | TGAATGGATCACGGA | 724 | CAG | E81G I83V |
| CC22 | GGAAAAGG | | AAAGG | | | |
| Guide- | CCACUGGCAGUA | 526 | CCACTGGCAGTACAG | 725 | GAG | L455P |
| CC23 | CAGAAGCA | | AAGCA | | | V457A |
| Guide- | AGAAUGAAUGGA | 527 | AGAATGAATGGATCA | 726 | AAG | N80G |
| CC24 | UCACGGAA | | CGGAA | | | E81G |
| Guide- | UGUAAACGAUGG | 528 | TGTAAACGATGGAGA | 727 | TAG | N326G |
| CC25 | AGAAAAUG | | AAATG | | | D327G |
| Guide- | AGGCUUACAACG | 529 | AGGCTTACAACGATG | 728 | AAG | Y494C |
| CC26 | AUGUGGGC | | TGGGC | | | N495D |
| Guide- | AAGUGACCAAUU | 530 | AAGTGACCAATTATT | 729 | AAG | T144A |
| CC27 | AUUCCCUC | | CCCTC | | | N145D |
| Guide- | UGUCACAACAAC | 531 | TGTCACAACAACCTT | 730 | TAG | T302A |
| CC28 | CUUGGAAG | | GGAAG | | | T303A |
| Guide- | AAUAGAUUGGUA | 532 | AATAGATTGGTATTT | 731 | CAG | I438M |
| CC29 | UUUUUGUC | | TTGTC | | | D439G |
| Guide- | ACAAUGGCACGG | 533 | ACAATGGCACGGTTG | 732 | AAG | N486G |
| CC30 | UUGAAUGU | | AATGT | | | T488A |
| Guide- | ACACAACAGGCA | 534 | ACACAACAGGCACAG | 733 | AAG | V213A |
| CC31 | CAGCUUUG | | CTTTG | | | V214A |
| Guide- | GUUCAGAGUUCU | 535 | GTTCAGAGTTCTATA | 734 | TAG | Q475R |
| CC32 | AUAGAUUC | | GATTC | | | S476G |
| Guide- | AGAUUUGAUUGU | 536 | AGATTTGATTGTTGA | 735 | AAG | D332G |
| CC33 | UGAAUAUG | | ATATG | | | I334V |
| Guide- | AUAAACAUUAAA | 537 | ATAAACATTAAATGC | 736 | CAG | V407A |
| CC34 | UGCUAUGG | | TATGG | | | Y408H |
| Guide- | AUCCAUCCAUCC | 538 | ATCCATCCATCCAGG | 737 | CAG | I39V H40R |
| CC35 | AGGAAAAU | | AAAAT | | | |
| Guide- | AUGGAUCACGGA | 539 | ATGGATCACGGAAAA | 738 | AAG | I83V T84A |
| CC36 | AAAGGCAG | | GGCAG | | | |
| Guide- | GUUGACUAUCAG | 540 | GTTGACTATCAGTTC | 739 | GAG | T276A |
| CC37 | UUCAGCGA | | AGCGA | | | I277V |
| Guide- | CACAACAACCUU | 541 | CACAACAACCTTGGA | 740 | TAG | T303A |
| CC38 | GGAAGUAG | | AGTAG | | | T304A |
| Guide- | CUAUAGAUUCUA | 542 | CTATAGATTCTAGTG | 741 | AAG | I478V |
| CC39 | GUGCAUUC | | CATTC | | | D479G |
| Guide- | UGCCAAUAAUAC | 543 | TGCCAATAATACTTT | 742 | CAG | N293G |
| CC40 | UUUUGGAU | | TGGAT | | | N294G |
| Guide- | GCUUUGUCAAAU | 544 | GCTTTGTCAAATGGA | 743 | GAG | K65E |
| CC41 | GGACUUUU | | CTTTT | | | |
| Guide- | CUUCCCCAUGAU | 545 | CTTCCCCATGATAAA | 744 | CAG | M318V |
| CC42 | AAACACUA | | CACTA | | | |
| Guide- | CGUUUGGAAAGC | 546 | CGTTTGGAAAGCTAG | 745 | CAG | K471E |
| CC43 | UAGUGGUU | | TGGTT | | | |
| Guide- | AAACUACAGGAG | 547 | AAACTACAGGAGAAA | 746 | TAG | Q256R |
| CC44 | AAAUAUAA | | TATAA | | | |
| Guide- | AGGAGGCACUUA | 548 | AGGAGGCACTTACAC | 747 | TAG | T389A |
| CC45 | CACAUUCC | | ATTCC | | | |
| Guide- | CUUGAAUGCACU | 549 | CTTGAATGCACTAGA | 748 | TAG | F483P |
| CC46 | AGAAUCUA | | ATCTA | | | |
| Guide- | UUCCAAACGGUG | 550 | TTCCAAACGGTGGCC | 749 | GAG | F469P |
| CC47 | GCCCAGAU | | CAGAT | | | |
| Guide- | UCCAGGAAAAUC | 551 | TCCAGGAAAATCAGA | 750 | TAG | K43G |
| CC48 | AGACUUAA | | CTTAA | | | |
| Guide- | CCCUCAAGGGGU | 552 | CCCTCAAGGGGTGCC | 751 | AAG | K149G |
| CC49 | GCCAGGGG | | AGGGG | | | |
| Guide- | UCCAAAGCAAGC | 553 | TCCAAAGCAAGCTAT | 752 | TAG | K218G |
| CC50 | UAUCUUCU | | CTTCT | | | |
| Guide- | UAGGGAAGGGGA | 554 | TAGGGAAGGGGAAGA | 753 | CAG | E225G |
| CC51 | AGAAUUCA | | ATTCA | | | |
| Guide- | AGCGAGAGUUAA | 555 | AGCGAGAGTTAATGA | 754 | GAG | R281G |
| CC52 | UGAUUCUG | | TTCTG | | | |
| Guide- | UUUGGAAAGCUA | 556 | TTTGGAAAGCTAGTG | 755 | GAG | K471G |
| CC53 | GUGGUUCA | | GTTCA | | | |
| Guide- | AGACGGUUCCCC | 557 | AGACGGTTCCCCTGG | 756 | CAG | S35P |
| CC54 | UGGACUCA | | ACTCA | | | |
| Guide- | ACGUUGACUAUC | 558 | ACGTTGACTATCAGT | 757 | GAG | T276A |
| CC55 | AGUUCAGC | | TCAGC | | | |
| Guide- | CUGCACAUCCAC | 559 | CTGCACATCCACTGG | 758 | CAG | V459A |
| CC56 | UGGCAGUA | | CAGTA | | | |
| Guide- | CACAUCCACUGG | 560 | CACATCCACTGGCAG | 759 | AAG | V457A |
| CC57 | CAGUACAG | | TACAG | | | |
| Guide- | AUCCACUGGCAG | 561 | ATCCACTGGCAGTAC | 760 | CAG | V457A |
| CC58 | UACAGAAG | | AGAAG | | | |
| Guide- | UUGACGUCAGAA | 562 | TTGACGTCAGAATTG | 761 | TAG | V399A |
| CC59 | UUGGACAC | | GACAC | | | |
| Guide- | AUUAACUCUCGC | 563 | ATTAACTCTCGCTGA | 762 | TAG | V282A |
| CC60 | UGAACUGA | | ACTGA | | | |
| Guide- | CCAUACAAGGAG | 564 | CCATACAAGGAGCGG | 763 | AAG | L124P |
| CC61 | CGGUCAAC | | TCAAC | | | Y125H |
| Guide- | UUCAGGAUGAAU | 565 | TTCAGGATGAATTTT | 76 | CAG | I201T |
| CC62 | UUUUCCGA | | TCCGA | | | L202P |
| Guide- | GUGACUUCAAUU | 566 | GTGACTTCAATTATG | 765 | CAG | D266G |
| CC63 | AUGAACGU | | AACGT | | | N268D |
| Guide- | GUCGGAAAAAUU | 567 | GTCGGAAAAATTCAT | 766 | AAG | E198G |
| CC64 | CAUCCUGA | | CCTGA | | | K199G |
| Guide- | AUUAUAUUUCUC | 568 | ATTATATTTCTCCTG | 767 | TAG | Y259H |
| CC65 | CUGUAGUU | | TAGTT | | | |
| Guide- | AAGGAGCGGUCA | 569 | AAGGAGCGGTCAACA | 768 | AAG | S123P |
| CC66 | ACAAGGAA | | AGGAA | | | |
| Guide- | GAGAUUAAAAGG | 570 | GAGATTAAAAGGCAC | 769 | GAG | K383G |
| CC67 | CACCGAAG | | CGAAG | | | |
| Guide- | AACGAGAUUAAA | 571 | AACGAGATTAAAAGG | 770 | AAG | R381G |
| CC68 | AGGCACCG | | CACCG | | | |
| Guide- | GAAAAAUUCAUC | 572 | GAAAAATTCATCCTG | 771 | GAG | K199G |
| CC69 | CUGAAAGU | | AAAGT | | | |
| Guide- | AUUCAUCCUGAA | 573 | ATTCATCCTGAAAGT | 772 | CAG | I201V |
| CC70 | AGUGAGGC | | GAGGC | | | |
| Guide- | GAAAGAAGACAA | 574 | GAAAGAAGACAACGA | 773 | TGG | K127R |
| CC71 | CGACACGC | | CACGC | | | E128G |
| | | | | | | D129G |
| Guide- | UACAGGAGAAAU | 575 | TACAGGAGAAATATA | 774 | TGG | Q256R |
| CC72 | AUAAUAGC | | ATAGC | | | E257G |
| | | | | | | K258E |
| Guide- | AUGAGAAUAAGC | 576 | ATGAGAATAAGCAGA | 775 | TGG | E76G |
| CC73 | AGAAUGAA | | ATGAA | | | N77G |
| | | | | | | K78E |
| Guide- | CCAGGGGAAGCC | 577 | CCAGGGGAAGCCTCT | 776 | AGG | Q152R |
| CC74 | UCUUCCCA | | TCCCA | | | K154G |
| Guide- | CAGAAAUCCUGA | 578 | CAGAAATCCTGACTT | 777 | AGG | E414G |
| CC75 | CUUACGAC | | ACGAC | | | I415V |
| Guide- | ACAGAACCUUCA | 579 | ACAGAACCTTCACTG | 778 | TGG | R353G |
| CC76 | CUGAUAAA | | ATAAA | | | T354A |
| Guide- | UCACGAGCCUGU | 580 | TCACGAGCCTGTCGT | 779 | AGG | L421P |
| CC77 | CGUAAGUC | | AAGTC | | | V422A |
| Guide- | ACUUACGACAGG | 581 | ACTTACGACAGGCTC | 780 | TGG | Y418C |
| CC78 | CUCGUGAA | | GTGAA | | | D419G |
| Guide- | UGUUCAUAUAGA | 582 | TGTTCATATAGATCC | 781 | TGG | M351T |
| CC79 | UCCACUGC | | ACTGC | | | |
| Guide- | CCAAACCUGAAC | 583 | CCAAACCTGAACACC | 782 | TGG | K342G |
| CC80 | ACCAGCAG | | AGCAG | | | |
| Guide- | CUGUCGUAAGUC | 584 | CTGTCGTAAGTCAGG | 783 | TGG | Y418H |
| CC81 | AGGAUUUC | | ATTTC | | | |
| Guide- | CAGAACCUUCAC | 585 | CAGAACCTTCACTGA | 784 | GGG | T354A |
| CC82 | UGAUAAAU | | TAAAT | | | |
| Guide- | UAUUUUAACUUU | 586 | TATTTTAACTTTGCA | 785 | AGG | N505G |
| CC83 | GCAUUUAA | | TTTAA | | | |
| Guide- | UAAGCAGAAUGA | 587 | TAAGCAGAATGAATG | 786 | CGG | K78R |
| CC84 | AUGGAUCA | | GATCA | | | Q79R |
| | | | | | | N80D |
| Guide- | GAAUGGCAUGCU | 588 | GAATGGCATGCTCCA | 787 | TGG | N423S |
| CC85 | CCAAUGUG | | ATGTG | | | M425V |
| Guide- | GUGCAGACACUA | 589 | GTGCAGACACTAAAC | 788 | TGG | Q460R |
| CC86 | AACUCAUC | | TCATC | | | T461A |
| Guide- | UGACCAAUUAUU | 590 | TGACCAATTATTCCC | 789 | GGG | T144A |
| CC87 | CCCUCAAG | | TCAAG | | | N145G |
| Guide- | GUGACCAAUUAU | 591 | GTGACCAATTATTCC | 790 | GGG | T144A |
| CC88 | UCCCUCAA | | CTCAA | | | N145G |
| Guide- | AGUGACCAAUUA | 592 | AGTGACCAATTATTC | 791 | AGG | T144A |
| CC89 | UUCCCUCA | | CCTCA | | | N145G |
| Guide- | GAAUGAAUGGAU | 593 | GAATGAATGGATCAC | 792 | AGG | N80S |
| CC90 | CACGGAAA | | GGAAA | | | E81G |
| Guide- | UGCAGACACUAA | 594 | TGCAGACACTAAACT | 793 | GGG | Q460R |
| CC91 | ACUCAUCU | | CATCT | | | T461A |
| Guide- | CCAAAGCAAGCU | 595 | CCAAAGCAAGCTATC | 794 | AGG | K218G |
| CC92 | AUCUUCUU | | TTCTT | | | S220G |
| Guide- | ACAGCACUGACU | 596 | ACAGCACTGACTTGC | 795 | TGG | V195A |
| CC93 | UGCCCUCC | | CCTCC | | | L196P |
| Guide- | GGAGGGCAAGUC | 597 | GGAGGGCAAGTCAGT | 796 | CGG | E191G |
| CC94 | AGUGCUGU | | GCTGT | | | K193G |
| Guide- | CACAUAAACAUU | 598 | CACATAAACATTAAA | 797 | TGG | V407A |
| CC95 | AAAUGCUA | | TGCTA | | | Y408H |
| Guide- | CAAAUGGACUUU | 599 | CAAATGGACTTTTGA | 798 | TGG | K65R |
| CC96 | UGAGAUCC | | GATCC | | | T67A |
| Guide- | CAAUGGCACGGU | 600 | CAATGGCACGGTTGA | 799 | AGG | N486S |
| CC97 | UGAAUGUA | | ATGTA | | | T488A |
| Guide- | AAAUACUGUAGU | 601 | AAATACTGTAGTGTT | 800 | TGG | V323A |
| CC98 | GUUUAUCA | | TATCA | | | F324L |
| Guide- | CAAAGCAAGCUA | 602 | CAAAGCAAGCTATCT | 801 | GGG | K218R |
| CC99 | UCUUCUUA | | TCTTA | | | S220G |
| Guide- | GGAAUAAACCUC | 603 | GGAATAAACCTCAAG | 802 | GGG | F162P |
| CC100 | AAGUCCUU | | TCCTT | | | I163T |
| Guide- | ACCACUAGCUUU | 604 | ACCACTAGCTTTCCA | 803 | TGG | L472P |
| CC101 | CCAAACGG | | AACGG | | | V473A |
| Guide- | GCAAGCUAUCUU | 605 | GCAAGCTATCTTCTT | 804 | AGG | S220G |
| CC102 | CUUAGGGA | | AGGGA | | | Y221C |
| Guide- | CAAGCUAUCUUC | 606 | CAAGCTATCTTCTTA | 805 | GGG | S220G |
| CC103 | UUAGGGAA | | GGGAA | | | Y221C |
| Guide- | UUUGAUCAUGAU | 607 | TTTGATCATGATGCC | 80€ | TGG | M171T |
| CC104 | GCCCGCCU | | CGCCT | | | I172T |
| Guide- | UUGAUCAUGAUG | 608 | TTGATCATGATGCCC | 807 | GGG | M171T |
| CC105 | CCCGCCUU | | GCCTT | | | I172T |
| Guide- | AUAGAUUGGUAU | 609 | ATAGATTGGTATTTT | 808 | AGG | I438M |
| CC106 | UUUUGUCC | | TGTCC | | | D439G |
| Guide- | AGGAAUAAACCU | 610 | AGGAATAAACCTCAA | 809 | TGG | F162P |
| CC107 | CAAGUCCU | | GTCCT | | | I163T |
| Guide- | CACAACAGGCAC | 611 | CACAACAGGCACAGC | 810 | AGG | V213A |
| CC108 | AGCUUUGA | | TTTGA | | | |
| Guide- | UGACGUCAGAAU | 612 | TGACGTCAGAATTGG | 811 | AGG | V399A |
| CC109 | UGGACACU | | ACACT | | | |
| Guide- | ACUACAGUAUUU | 613 | ACTACAGTATTTGTA | 812 | TGG | T322A |
| CC110 | GUAAACGA | | AACGA | | | |
| Guide- | AGCAAAUGUCAC | 614 | AGCAAATGTCACAAC | 813 | TGG | N300G |
| CC111 | AACAACCU | | AACCT | | | |
| Guide- | GUCUGAUUUUCC | 615 | GTCTGATTTTCCTGG | 814 | TGG | S44P |
| CC112 | UGGAUGGA | | ATGGA | | | |
| Guide- | UGCUGAUCCAAA | 616 | TGCTGATCCAAAAGT | 815 | TGG | S298P |
| CC113 | AGUAUUAU | | ATTAT | | | |
| Guide- | AUCAGACUUAAU | 617 | ATCAGACTTAATAGT | 816 | TGG | D45G |
| CC114 | AGUCCGCG | | CCGCG | | | |
| Guide- | UGCAUUCAAGCA | 618 | TGCATTCAAGCACAA | 817 | CGG | K484G |
| CC115 | CAAUGGCA | | TGGCA | | | |
| Guide- | UCCCAGAGCCCA | 619 | TCCCAGAGCCCACAA | 818 | TGG | E435G |
| CC116 | CAAUAGAU | | TAGAT | | | |
| Guide- | UCAGCGAGAGUU | 620 | TCAGCGAGAGTTAAT | 819 | TGG | R281G |
| CC117 | AAUGAUUC | | GATTC | | | |
| Guide- | GUGUGAAACGCG | 621 | GTGTGAAACGCGCCT | 820 | CGG | K176G |
| CC118 | CCUACCAU | | ACCAT | | | |
| Guide- | UCAGACUUAAUA | 622 | TCAGACTTAATAGTC | 821 | GGG | D45G |
| CC119 | GUCCGCGU | | CGCGT | | | |
| Guide- | UCUAGUGCAUUC | 623 | TCTAGTGCATTCAAG | 822 | TGG | S481G |
| CC120 | AAGCACAA | | CACAA | | | |
| Guide- | AUUCCCUCAAGG | 624 | ATTCCCTCAAGGGGT | 823 | GGG | K149E |
| CC121 | GGUGCCAG | | GCCAG | | | |
| Guide- | AAGGCAGAAGCC | 625 | AAGGCAGAAGCCACC | 824 | CGG | E88G |
| CC122 | ACCAACAC | | AACAC | | | |
| Guide- | GAGGUUUAUUCC | 626 | GAGGTTTATTCCTGA | 825 | AGG | I163V |
| CC123 | UGACCCCA | | CCCCA | | | |
| Guide- | UUUAUUCCUGAC | 627 | TTTATTCCTGACCCC | 826 | GGG | I163V |
| CC124 | CCCAAGGC | | AAGGC | | | |
| Guide- | GUUUAUUCCUGA | 628 | GTTTATTCCTGACCC | 827 | CGG | I163V |
| CC125 | CCCCAAGG | | CAAGG | | | |
| Guide- | CAUACAAGGAGC | 629 | CATACAAGGAGCGGT | 828 | AGG | L124P |
| CC126 | GGUCAACA | | CAACA | | | Y125H |
| Guide- | AAAAAUUCAUCC | 630 | AAAAATTCATCCTGA | 829 | AGG | K199G |
| CC127 | UGAAAGUG | | AAGTG | | | I201V |
| Guide- | AAAUAUAAUAGC | 631 | AAATATAATAGCTGG | 830 | CGG | Y259C |
| CC128 | UGGCAUCA | | CATCA | | | N260D/G/ |
| | | | | | | S |
| Guide- | UGACUUCAAUUA | 632 | TGACTTCAATTATGA | 831 | AGG | D266G |
| CC129 | UGAACGUC | | ACGTC | | | N268G |
| Guide- | CUAGUUCUGUGU | 633 | CTAGTTCTGTGTACT | 832 | TGG | S240G |
| CC130 | ACUCAACG | | CAACG | | | |
| Guide- | AGAUUAAAAGGC | 634 | AGATTAAAAGGCACC | 833 | AGG | K383G |
| CC131 | ACCGAAGG | | GAAGG | | | |
| Guide- | ACGAGAUUAAAA | 635 | ACGAGATTAAAAGGC | 834 | AGG | R381G |
| CC132 | GGCACCGA | | ACCGA | | | |
| Guide- | GGAUGAAACGAA | 636 | GGATGAAACGAATGA | 835 | AGC | E73G |
| CC133 | UGAGAAUA | | GAATA | | | T74A |
| | | | | | | N75G |
| Guide- | AACUACAGGAGA | 637 | AACTACAGGAGAAAT | 836 | AGC | Q256R |
| CC134 | AAUAUAAU | | ATAAT | | | E257G |
| | | | | | | K258G |
| Guide- | UGGGAAAGAAGA | 638 | TGGGAAAGAAGACAA | 837 | CGC | K127G |
| CC135 | CAACGACA | | CGACA | | | E128G |
| | | | | | | D129G |
| Guide- | GCCAAUAAUACU | 639 | GCCAATAATACTTTT | 838 | AGC | N293G |
| CC136 | UUUGGAUC | | GGATC | | | N294G |
| | | | | | | T295A |
| Guide- | CUUACGACAGGC | 640 | CTTACGACAGGCTCG | 839 | GGC | Y418C |
| CC137 | UCGUGAAU | | TGAAT | | | D419G |
| | | | | | | R420G |
| Guide- | GUUAAAAUAGGC | 641 | GTTAAAATAGGCAGA | 840 | TGC | Y503H |
| CC138 | AGAAGUCU | | AGTCT | | | F504P |
| Guide- | UUCUGUUCAUAU | 642 | TTCTGTTCATATAGA | 841 | TGC | Y350H |
| CC139 | AGAUCCAC | | TCCAC | | | M351T |
| Guide- | AGAAAUCCUGAC | 643 | AGAAATCCTGACTTA | 842 | GGC | I415V |
| CC140 | UUACGACA | | CGACA | | | T417A |
| Guide- | AACGAUGUGGGC | 644 | AACGATGTGGGCAAG | 843 | TGC | D496G |
| CC141 | AAGACUUC | | ACTTC | | | K499E |
| Guide- | AUUCCCCAAACC | 645 | ATTCCCCAAACCTGA | 844 | AGC | K342G |
| CC142 | UGAACACC | | ACACC | | | |
| Guide- | CGACAGGCUCGU | 646 | CGACAGGCTCGTGAA | 845 | TGC | R420G |
| CC143 | GAAUGGCA | | TGGCA | | | |
| Guide- | ACUUCUGCCUAU | 647 | ACTTCTGCCTATTTT | 846 | TGC | Y503C |
| CC144 | UUUAACUU | | AACTT | | | |
| Guide- | GCGACGAGAUUA | 648 | GCGACGAGATTAGGC | 847 | TGC | D52G |
| CC145 | GGCUGUUA | | TGTTA | | | E53G I54V |
| | | | | | | R55G |
| Guide- | AAGACAACGACA | 649 | AAGACAACGACACGC | 848 | CGC | D129G |
| CC146 | CGCUGGUC | | TGGTC | | | N130G |
| | | | | | | D131G |
| | | | | | | T132A |
| Guide- | UGGAUCACGGAA | 650 | TGGATCACGGAAAAG | 849 | AGC | I83V T84A |
| CC147 | AAGGCAGA | | GCAGA | | | E85G |
| | | | | | | K86E |
| Guide- | GACACAGACACA | 651 | GACACAGACACAACA | 850 | AGC | V213A |
| CC148 | ACAGGCAC | | GGCAC | | | V214A |
| | | | | | | S215P |
| | | | | | | V216A |
| Guide- | GGGAAGAAUUCA | 652 | GGGAAGAATTCACAG | 851 | TGC | E227G |
| CC149 | CAGUGACG | | TGACG | | | E228G |
| | | | | | | T230A |
| Guide- | GCACCAACAAAC | 653 | GCACCAACAAACACG | 852 | AGC | N99G |
| CC150 | ACGGCUUA | | GCTTA | | | K100G |
| | | | | | | H101R |
| Guide- | UAUAGAUUCUAG | 654 | TATAGATTCTAGTGC | 853 | AGC | I478M |
| CC151 | UGCAUUCA | | ATTCA | | | D479G |
| | | | | | | S481G |
| Guide- | UCAUGAUCAAAA | 655 | TCATGATCAAAAGTG | 854 | CGC | I172V |
| CC152 | GUGUGAAA | | TGAAA | | | K173G |
| | | | | | | S174G |
| Guide- | AUGAUCAAAAGU | 656 | ATGATCAAAAGTGTG | 855 | CGC | I172V |
| CC153 | GUGAAACG | | AAACG | | | K173G |
| | | | | | | S174G |
| Guide- | AAUGAAUGGAUC | 657 | AATGAATGGATCACG | 856 | GGC | E81G I83V |
| CC154 | ACGGAAAA | | GAAAA | | | T84A |
| Guide- | CCAAUUAUUCCC | 658 | CCAATTATTCCCTCA | 857 | TGC | N145S |
| CC155 | UCAAGGGG | | AGGGG | | | Y146C |
| Guide- | CAGACUUAAUAG | 659 | CAGACTTAATAGTCC | 858 | GGC | D45G |
| CC156 | UCCGCGUG | | GCGTG | | | I47V |
| Guide- | UCUGACGUCAAU | 660 | TCTGACGTCAATGCT | 859 | AGC | D398G |
| CC157 | GCUGCCAU | | GCCAT | | | N400G |
| Guide- | GCAUAACAGCCU | 661 | GCATAACAGCCTAAT | 860 | CGC | L56P L57P |
| CC158 | AAUCUCGU | | CTCGT | | | |
| Guide- | UUUUUCCGACAG | 662 | TTTTTCCGACAGCAC | 861 | TGC | L196P |
| CC159 | CACUGACU | | TGACT | | | S197P |
| Guide- | UUUCCGUGAUCC | 663 | TTTCCGTGATCCATT | 862 | TGC | W82R |
| CC160 | AUUCAUUC | | CATTC | | | I83T |
| Guide- | UUUGACAAAGCC | 664 | TTTGACAAAGCCCGG | 863 | TGC | F63P |
| CC161 | CGGAUCAG | | ATCAG | | | V64A |
| Guide- | GCCCAGAUGAGU | 665 | GCCCAGATGAGTTTA | 864 | TGC | S464P |
| CC162 | UUAGUGUC | | GTGTC | | | S465P |
| Guide- | GCUGAACUGAUA | 666 | GCTGAACTGATAGTC | 865 | TGC | I277T |
| CC163 | GUCAACGU | | AACGT | | | S279P |
| Guide- | ACACUUUUGAUC | 667 | ACACTTTTGATCATG | 866 | CGC | M171T |
| CC164 | AUGAUGCC | | ATGCC | | | I172T |
| Guide- | GAAAAUCAGACU | 668 | GAAAATCAGACTTAA | 867 | CGC | K43R |
| CC165 | UAAUAGUC | | TAGTC | | | D45G |
| Guide- | GCAGACACUAAA | 669 | GCAGACACTAAACTC | 868 | GGC | T461A |
| CC166 | CUCAUCUG | | ATCTG | | | N463G |
| Guide- | GGACCAGGAGGG | 670 | GGACCAGGAGGGCAA | 869 | TGC | Q190R |
| CC167 | CAAGUCAG | | GTCAG | | | E191G |
| Guide- | GCUGAUCCAAAA | 671 | GCTGATCCAAAAGTA | 870 | GGC | F296P |
| CC168 | GUAUUAUU | | TTATT | | | S298P |
| Guide- | ACAUCCACUGGC | 672 | ACATCCACTGGCAGT | 871 | AGC | L455P |
| CC169 | AGUACAGA | | ACAGA | | | V457A |
| Guide- | CACUGGCAGUAC | 673 | CACTGGCAGTACAGA | 872 | AGC | V454A |
| CC170 | AGAAGCAG | | AGCAG | | | L455P |
| Guide- | AGGCAGAAGCCA | 674 | AGGCAGAAGCCACCA | 873 | GGC | E88G |
| CC171 | CCAACACC | | ACACC | | | T90A |
| Guide- | AGGUUUAUUCCU | 675 | AGGTTTATTCCTGAC | 874 | GGC | I163V |
| CC172 | GACCCCAA | | CCCAA | | | |
| Guide- | CCAAGCUUUUCC | 676 | CCAAGCTTTTCCTTG | 875 | CGC | K116R |
| CC173 | UUGUUGAC | | TTGAC | | | |
| Guide- | UUAGUGUCUGCA | 677 | TTAGTGTCTGCACAT | 876 | GGC | V459A |
| CC174 | CAUCCACU | | CCACT | | | |
| Guide- | CCACUAGCUUUC | 678 | CCACTAGCTTTCCAA | 877 | GGC | L472P |
| CC175 | CAAACGGU | | ACGGT | | | |
| Guide- | CCUCAAGGGGUG | 679 | CCTCAAGGGGTGCCA | 878 | AGC | K149G |
| CC176 | CCAGGGGA | | GGGGA | | | |
| Guide- | UGUGAAACGCGC | 680 | TGTGAAACGCGCCTA | 879 | GGC | K176G |
| CC177 | CUACCAUC | | CCATC | | | |
| Guide- | CUAGUGCAUUCA | 681 | CTAGTGCATTCAAGC | 880 | GGC | K484G |
| CC178 | AGCACAAU | | ACAAT | | | |
| Guide- | CCGCGUGGGCGA | 682 | CCGCGTGGGCGACGA | 881 | GGC | D52G |
| CC179 | CGAGAUUA | | GATTA | | | |
| Guide- | UUAUUCCUGACC | 683 | TTATTCCTGACCCCA | 882 | GGC | D165G |
| CC180 | CCAAGGCG | | AGGCG | | | |
| Guide- | ACUCCAGAAUCA | 684 | ACTCCAGAATCATTA | 883 | CGC | S285P |
| CC181 | UUAACUCU | | ACTCT | | | |
| Guide- | GGCUGUUAUGCA | 685 | GGCTGTTATGCACTG | 884 | GGC | T59A |
| CC182 | CUGAUCCG | | ATCCG | | | |
| Guide- | UUCAUCUAACGA | 686 | TTCATCTAACGAGAT | 885 | GGC | H378R |
| CC183 | GAUUAAAA | | TAAAA | | | T380A |
| | | | | | | R381G |
| Guide- | ACAGGAGAAAUA | 687 | ACAGGAGAAATATAA | 886 | GGC | E257G |
| CC184 | UAAUAGCU | | TAGCT | | | K258G |
| | | | | | | Y259C |
| Guide- | UCAGGAUGAAUU | 688 | TCAGGATGAATTTTT | 887 | AGC | F200P |
| CC185 | UUUCCGAC | | CCGAC | | | I201T |
| Guide- | GACUUCAAUUAU | 689 | GACTTCAATTATGAA | 888 | GGC | N268G |
| CC186 | GAACGUCA | | CGTCA | | | Y269C |
| Guide- | AGGAGCGGUCAA | 690 | AGGAGCGGTCAACAA | 889 | AGC | V120A |
| CC187 | CAAGGAAA | | GGAAA | | | S123P |
| Guide- | GAUUAAAAGGCA | 691 | GATTAAAAGGCACCG | 890 | GGC | K383G |
| CC188 | CCGAAGGA | | AAGGA | | | T385A |
| Guide- | AAAAUUCAUCCU | 692 | AAAATTCATCCTGAA | 891 | GGC | I201V |
| CC189 | GAAAGUGA | | AGTGA | | | |
| gRNA931; | AUAAUAGCUGGC | 693 | ATAATAGCTGGCATC | 892 | GACT | S261G |
| gRNA2342; | AUCACGGU | | ACGGT | | | N260D |
| gRNA2343; | | | | | | |
| CC200 | | | | | | |
| gRNA889 | CCACUAGCUUUC | 694 | CCACTAGCTTTCCAA | 893 | GGCC | L472P |
| | CAAACGGU | | ACGGT | | | |
| gRNA908 | GCUGAACUGAUA | 695 | GCTGAACTGATAGTC | 894 | TGCC | S279P |
| | GUCAACGU | | AACGT | | | |
| gRNA918 | UUUGACAAAGCC | 696 | TTTGACAAAGCCCGG | 895 | TGCA | V64A |
| | CGGAUCAG | | ATCAG | | | |
| gRNA923 | UGAAAGUGAGGC | 697 | TGAAAGTGAGGCCAG | 896 | GGCT | Silent |
| | CAGGUACU | | GTACT | | | |
| gRNA928 | AAACAGUCAGGU | 698 | AAACAGTCAGGTGAG | 897 | CGCT | S251G |
| | GAGUGAAU | | TGAAT | | | |
| gRNA929 | AACUACAGGAGA | 699 | AACTACAGGAGAAAT | 898 | AGCT | Silent |
| | AAUAUAAU | | ATAAT | | | |
| gRNA944 | GAUUAAAAGGCA | 700 | GATTAAAAGGCACCG | 899 | GGCA | Silent |
| | CCGAAGGA | | AAGGA | | | |
| gRNA291 | GGCUUUACCUCC | 701 | GGCTTTACCTCCAAT | 900 | AGG | A to G at |
| | AAUGGUGC | | GGTGC | | | splice site |
| | | | | | | (KO) |
| gRNA295 | CAGUACCUGGCC | 702 | CAGTACCTGGCCTCA | 901 | AGG | A to G at |
| | UCACUUUC | | CTTTC | | | splice site |
| | | | | | | (KO) |

TABLE 2
Exemplary Target Sequences. In embodiments, −198 or −114 refers to the
nucleotide 198 or 114 nucleotides upstream of the first transcribe nucleotide of HBG1/2. In
some instances, the site −114 is alternatively referred to as the site −115. In the table the
abbreviation “c.” indicates that position +1 is the first nucleotide transcribed and −1 is the
last nucleotide 5′ of the first transcribed nucleotide.

| Guide | | Description | | | SEQ | |
|---|---|---|---|---|---|---|
| Name | Gene | of Edit | Base Editor | gRNA Spacer Sequence | ID NO | PAM |
| sgRNA_ | HBB | Makassar | ABE | ACUUCUCCACAGGAGUCA | 902 | TGC |
| 017 | | | | GG | | |
| sgRNA_ | HBB | Makassar | ABE | UUCUCCACAGGAGUCAGG | 941 | |
| 027 | | | | UG | | |
| | HBG1/2 | c. −198 T > C | ABE | GUGGGGAAGGGGCCCCCA | 903 | AGG |
| | | | | AG | | |
| | HBG1/2 | c. −198 T > C | ABE | AUUGAGAUAGUGUGGGGA | 904 | GGG |
| | | | | AG | | |
| | HBG1/2 | c. −198 T > C | ABE | CAUUGAGAUAGUGUGGGG | 905 | GGG |
| | | | | AA | | |
| | HBG1/2 | c. −198 T > C | ABE | GCAUUGAGAUAGUGUGGG | 906 | AGG |
| | | | | GA | | |
| | HBG1/2 | c. −198 T > C | ABE | GUGGGGAAGGGGCCCCCA | 907 | AGG |
| | | | | AG | | |
| | HBG1/2 | c. −114 ~ | CBE and/or | GCUAUUGGUCAAGGCAAG | 908 | TGG |
| | | −102 deletion | ABE | GC | | |
| | HBG1/2 | c. −114 ~ | CBE and/or | CAAGGCUAUUGGUCAAGG | 909 | AGG |
| | | −102 deletion | ABE | CA | | |
| | HBG1/2 | c. −114 ~ | CBE and/or | CUUGUCAAGGCUAUUGGU | 910 | AGG |
| | | −102 deletion | ABE | CA | | |
| sgRNA_ | HBG1/2 | c. −114 ~ | CBE and/or | CUUGACCAAUAGCCUUGA | 911 | AGG |
| 015 | | −102 deletion | ABE | CA | | |
| (TSBTx045) | HBG1/2 | c. −114 ~ | CBE and/or | GUUUGCCUUGUCAAGGCU | 912 | TGG |
| | | −102 deletion | ABE | AU | | |
| | HBG1/2 | c. −114 ~ | CBE and/or | UGGUCAAGUUUGCCUUGU | 913 | AGG |
| | | 102 deletion | ABE | CA | | |
| | HBG1/2 | c. −198 T > C | ABE | UGGGGAAGGGGCCCCCAA | 914 | GGA |
| | | | | GA | | |
| | HBG1/2 | c. −198 T > C | ABE | GUGUGGGGAAGGGGCCCC | 915 | AGA |
| | | | | CA | | |
| | HBG1/2 | c. −175 T > C | ABE | UCAGACAGAUAUUUGCAU | 916 | AGA |
| | | | | UG | | |
| | HBG1/2 | c. −175 T > C | ABE | UUUCAGACAGAUAUUUGC | 917 | TGA |
| | | | | AU | | |
| | HBG1/2 | c. −114 ~ | CBE and/or | CUUGCCUUGACCAAUAGC | 918 | TGA |
| | | −102 deletion | ABE | CU | | |
| | HBG1/2 | c. −114 ~ | CBE and/or | UAGCCUUGACAAGGCAAA | 919 | TGA |
| | | −102 deletion | ABE | CU | | |
| | HBG1/2 | c. -90 | CBE and/or | CAAACUUGACCAAUAGUC | 920 | AGA |
| | | BCL11A | ABE | UU | | |
| | | binding | | | | |
| | HBG1/2 | c. −198 T > C | ABE | UGUGGGGAAGGGGCCCCC | 921 | GAGG |
| | | | | AA | | AT |
| | HBG1/2 | c. −202 | CBE and/or | GGGCCCCUUCCCCACACU | 922 | CTCA |
| | | C > T, −201 | ABE | AU | | AT |
| | | C > T, −198 | | | | |
| | | T > C, −197 | | | | |
| | | C > T, −196 | | | | |
| | | C > T, −195 | | | | |
| | | C > G | | | | |
| | HBG1/2 | c. −175 T > C | ABE | CAGACAGAUAUUUGCAUU | 923 | GATA |
| | | | | GA | | GT |
| | HBG1/2 | c. −175 T > C | ABE | UUUCAGACAGAUAUUUGC | 924 | TGAG |
| | | | | AU | | AT |
| | HBG1/2 | c. −114 ~ | CBE and/or | GCCUUGACAAGGCAAACU | 925 | ACCA |
| | | −102 deletion | ABE | UG | | AT |
| | HBG1/2 | c. −114 ~ | CBE and/or | UUGACAAGGCAAACUUGA | 926 | AATA |
| | | −102 deletion | ABE | CC | | GT |
| | HBG1/2 | c. -90 | CBE and/or | UGACCAAUAGUCUUAGAG | 927 | TCCA |
| | | BCL11A | ABE | UA | | GT |
| | | binding | | | | |
| | HBG1/2 | c. −175 T > C | ABE | AGACAGAUAUUUGCAUUG | 928 | TTT |
| | | | | AGAUA | | |

### Nucleobase Editors

[0581] Useful in the methods and compositions described herein are nucleobase editors that edit, modify or alter a target nucleotide sequence of a polynucleotide. Nucleobase editors described herein typically include a polynucleotide programmable nucleotide binding domain and a nucleobase editing domain (e.g., adenosine deaminase, cytidine deaminase, or a dual deaminase). A polynucleotide programmable nucleotide binding domain, when in conjunction with a bound guide polynucleotide (e.g., gRNA), can specifically bind to a target polynucleotide sequence and thereby localize the base editor to the target nucleic acid sequence desired to be edited.

### Polynucleotide Programmable Nucleotide Binding Domain

[0582] Polynucleotide programmable nucleotide binding domains bind polynucleotides (e.g., RNA, DNA). A polynucleotide programmable nucleotide binding domain of a base editor can itself comprise one or more domains (e.g., one or more nuclease domains). In some embodiments, the nuclease domain of a polynucleotide programmable nucleotide binding domain comprises an endonuclease or an exonuclease.

[0583] Disclosed herein are base editors comprising a polynucleotide programmable nucleotide binding domain comprising all or a portion (e.g., a functional portion) of a CRISPR protein (i.e., a base editor comprising as a domain all or a portion (e.g., a functional portion) of a CRISPR protein (e.g., a Cas protein), also referred to as a “CRISPR protein-derived domain” of the base editor). A CRISPR protein-derived domain incorporated into a base editor can be modified compared to a wild-type or natural version of the CRISPR protein. A CRISPR protein-derived domain can comprise one or more mutations, insertions, deletions, rearrangements and/or recombinations relative to a wild-type or natural version of the CRISPR protein.

[0584] Cas proteins that can be used herein include class 1 and class 2. Non-limiting examples of Cas proteins include Cas1, Cas1B, Cas2, Cas3, Cas4, Cas5, Cas5d, Cas5t, Cas5h, Cas5a, Cas6, Cas7, Cas8, Cas9 (also known as Csn1 or Csx12), Cas10, Csy1, Csy2, Csy3, Csy4, Cse1, Cse2, Cse3, Cse4, Cse5e, Csc1, Csc2, Csa5, Csn1, Csn2, Csm1, Csm2, Csm3, Csm4, Csm5, Csm6, Cmr1, Cmr3, Cmr4, Cmr5, Cmr6, Csb1, Csb2, Csb3, Csx17, Csx14, Csx10, Csx16, CsaX, Csx3, Csx1, Csx1S, Csf1, Csf2, CsO, Csf4, Csd1, Csd2, Cst1, Cst2, Csh1, Csh2, Csa1, Csa2, Csa3, Csa4, Csa5, Cas12a/Cpf1, Cas12b/C2c1 (e.g., SEQ ID NO: 232), Cas12c/C2c3, Cas12d/CasY, Cas12e/CasX, Cas12g, Cas12h, Cas12i, and Cas12j/CasΦ, CARF, DinG, homologues thereof, or modified versions thereof. A CRISPR enzyme can direct cleavage of one or both strands at a target sequence, such as within a target sequence and/or within a complement of a target sequence. For example, a CRISPR enzyme can direct cleavage of one or both strands within about 1, 2, 3, 4, 5, 6, 7, 8, 9, 10, 15, 20, 25, 50, 100, 200, 500, or more base pairs from the first or last nucleotide of a target sequence.

[0585] A vector that encodes a CRISPR enzyme that is mutated to with respect to a corresponding wild-type enzyme such that the mutated CRISPR enzyme lacks the ability to cleave one or both strands of a target polynucleotide containing a target sequence can be used. A Cas protein (e.g., Cas9, Cas12) or a Cas domain (e.g., Cas9, Cas12) can refer to a polypeptide or domain with at least or at least about 50%, 60%, 70%, 80%, 90%, 91%, 92%, 93%, 94%, 95%, 96%, 97%, 98%, 99%, or 100% sequence identity and/or sequence homology to a wild-type exemplary Cas polypeptide or Cas domain. Cas (e.g., Cas9, Cas12) can refer to the wild-type or a modified form of the Cas protein that can comprise an amino acid change such as a deletion, insertion, substitution, variant, mutation, fusion, chimera, or any combination thereof. In some embodiments, a CRISPR protein-derived domain of a base editor can include all or a portion (e.g., a functional portion) of Cas9 from Corynebacterium ulcerans (NCBI Refs: NC_015683.1, NC_017317.1); Corynebacterium diphtheria (NCBI Refs: NC_016782.1, NC_016786.1); Spiroplasma syrphidicola (NCBI Ref: NC_021284.1); Prevotella intermedia (NCBI Ref: NC_017861.1); Spiroplasma taiwanense (NCBI Ref: NC_021846.1); Streptococcus iniae (NCBI Ref: NC_021314.1); Belliella baltica (NCBI Ref: NC_018010.1); Psychroflexus torquis (NCBI Ref: NC_018721.1); Streptococcus thermophilus (NCBI Ref: YP_820832.1); Listeria innocua (NCBI Ref: NP_472073.1); Campylobacter jejuni (NCBI Ref: YP_002344900.1); Neisseria meningitidis (NCBI Ref: YP_002342100.1), Streptococcus pyogenes, or Staphylococcus aureus.

[0586] Some aspects of the disclosure provide high fidelity Cas9 domains. High fidelity Cas9 domains are known in the art and described, for example, in Kleinstiver, B. P., et al. “High-fidelity CRISPR-Cas9 nucleases with no detectable genome-wide off-target effects.” Nature 529, 490-495 (2016); and Slaymaker, I. M., et al. “Rationally engineered Cas9 nucleases with improved specificity.” Science 351, 84-88 (2015); the entire contents of each of which are incorporated herein by reference. An Exemplary high fidelity Cas9 domain is provided in the Sequence Listing as SEQ ID NO: 233.

[0587] In some embodiments, any of the Cas9 fusion proteins or complexes provided herein comprise one or more of a D10A, N497X, a R661X, a Q695X, and/or a Q926X mutation, or a corresponding mutation in any of the amino acid sequences provided herein, wherein X is any amino acid.

[0588] Typically, Cas9 proteins, such as Cas9 from S. pyogenes (spCas9), require a “protospacer adjacent motif (PAM)” or PAM-like motif, which is a 2-6 base pair DNA sequence immediately following the DNA sequence targeted by the Cas9 nuclease in the CRISPR bacterial adaptive immune system. The presence of an NGG PAM sequence is required to bind a particular nucleic acid region, where the “N” in “NGG” is adenosine (A), thymidine (T), or cytosine (C), and the G is guanosine. In some embodiments, any of the fusion proteins or complexes provided herein may contain a Cas9 domain that is capable of binding a nucleotide sequence that does not contain a canonical (e.g., NGG) PAM sequence. Cas9 domains that bind to non-canonical PAM sequences have been described in the art and would be apparent to the skilled artisan. For example, Cas9 domains that bind non-canonical PAM sequences have been described in Kleinstiver, B. P., et al., “Engineered CRISPR-Cas9 nucleases with altered PAM specificities” Nature 523, 481-485 (2015); and Kleinstiver, B. P., et al., “Broadening the targeting range of Staphylococcus aureus CRISPR-Cas9 by modifying PAM recognition” Nature Biotechnology 33, 1293-1298 (2015); the entire contents of each are hereby incorporated by reference.

[0589] In some embodiments, the napDNAbp is a circular permutant (e.g., SEQ ID NO: 238).

[0590] In some embodiments, the polynucleotide programmable nucleotide binding domain comprises a nickase domain. Herein the term “nickase” refers to a polynucleotide programmable nucleotide binding domain comprising a nuclease domain that is capable of cleaving only one strand of the two strands in a duplexed nucleic acid molecule (e.g., DNA). For example, where a polynucleotide programmable nucleotide binding domain comprises a nickase domain derived from Cas9, the Cas9-derived nickase domain can include a D10A mutation and a histidine at position 840. In another example, a Cas9-derived nickase domain comprises an H840A mutation, while the amino acid residue at position 10 remains a D.

[0591] In some embodiments, a Cas9 nuclease has an inactive (e.g., an inactivated) DNA cleavage domain, that is, the Cas9 is a nickase, referred to as an “nCas9” protein (for “nickase” Cas9; SEQ ID NO: 201). The Cas9 nickase may be a Cas9 protein that is capable of cleaving only one strand of a duplexed nucleic acid molecule (e.g., a duplexed DNA molecule). In some embodiments the Cas9 nickase comprises an amino acid sequence that is at least 60%, at least 65%, at least 70%, at least 75%, at least 80%, at least 85%, at least 90%, at least 95%, at least 96%, at least 97%, at least 98%, at least 99%, or at least 99.5% identical to any one of the Cas9 nickases provided herein. Additional suitable Cas9 nickases will be apparent to those of skill in the art based on this disclosure and knowledge in the field and are within the scope of this disclosure.

[0592] Also provided herein are base editors comprising a polynucleotide programmable nucleotide binding domain which is catalytically dead (i.e., incapable of cleaving a target polynucleotide sequence). For example, in the case of a base editor comprising a Cas9 domain, the Cas9 can comprise both a D10A mutation and an H840A mutation. In further embodiments, a catalytically dead polynucleotide programmable nucleotide binding domain comprises a point mutation (e.g., D10A or H840A) as well as a deletion of all or a portion (e.g., a functional portion) of a nuclease domain. dCas9 domains are known in the art and described, for example, in Qi et al., “Repurposing CRISPR as an RNA-guided platform for sequence-specific control of gene expression.” Cell. 2013; 152 (5): 1173-83, the entire contents of which are incorporated herein by reference.

[0593] The term “protospacer adjacent motif (PAM)” or PAM-like motif refers to a 2-6 base pair DNA sequence immediately following the DNA sequence targeted by a nucleic acid programmable DNA binding protein. In some embodiments, the PAM can be a 5′ PAM (i.e., located upstream of the 5′ end of the protospacer). In other embodiments, the PAM can be a 3′ PAM (i.e., located downstream of the 5′ end of the protospacer). The PAM sequence can be any PAM sequence known in the art. Suitable PAM sequences include, but are not limited to, NGG, NGA, NGC, NGN, NGT, NGTT, NGCG, NGAG, NGAN, NGNG, NGCN, NGCG, NGTN, NNGRRT, NNNRRT, NNGRR (N), TTTV, TYCV, TYCV, TATV, NNNNGATT, NNAGAAW, or NAAAAC. Y is a pyrimidine; N is any nucleotide base; W is A or T.

[0594] A base editor provided herein can comprise a CRISPR protein-derived domain that is capable of binding a nucleotide sequence that contains a canonical or non-canonical protospacer adjacent motif (PAM) sequence.

[0595] In some embodiments, the PAM is an “NRN” PAM where the “N” in “NRN” is adenine (A), thymine (T), guanine (G), or cytosine (C), and the R is adenine (A) or guanine (G); or the PAM is an “NYN” PAM, wherein the “N” in NYN is adenine (A), thymine (T), guanine (G), or cytosine (C), and the Y is cytidine (C) or thymine (T), for example, as described in R. T. Walton et al., 2020, Science, 10.1126/science.aba8853 (2020), the entire contents of which are incorporated herein by reference.

[0596] Several PAM variants are described in Table 3 below.

TABLE 3
Cas9 proteins and corresponding PAM sequences.

| Variant | PAM |
|---|---|
| spCas9 | NGG |
| spCas9-VRQR | NGA |
| spCas9-VRER | NGCG |
| xCas9 (sp) | NGN |
| saCas9 | NNGRRT |
| saCas9-KKH | NNNRRT |
| spCas9-MQKSER | NGCG |
| spCas9-MQKSER | NGCN |
| spCas9-LRKIQK | NGTN |
| spCas9-LRVSQK | NGTN |
| spCas9-LRVSQL | NGTN |
| spCas9-MQKFRAER | NGC |
| Cpf1 | 5′ (TTTV) |
| SpyMac | 5′ -NAA-3 ′ |

N is A, C, T, or G; and V is A, C, or G.

[0597] In some embodiments, the PAM is NGC. In some embodiments, the NGC PAM is recognized by a Cas9 variant. In some embodiments, the NGC PAM Cas9 variant includes one or more amino acid substitutions selected from D1135M, S1136Q, G1218K, E1219F, A1322R, D1332A, R1335E, and T1337R (collectively termed “MQKFRAER”) of spCas9 (SEQ ID No: 197), or a corresponding mutation in another Cas9. In some embodiments, the Cas9 variant contains one or more amino acid substitutions selected from D1135V, G1218R, R1335Q, and T1337R (collectively termed VRQR) of spCas9 (SEQ ID No: 197), or a corresponding mutation in another Cas9. In some embodiments, the Cas9 variant contains one or more amino acid substitutions selected from D1135V, G1218R, R1335E, and T1337R (collectively termed VRER) of spCas9 (SEQ ID No: 197), or a corresponding mutation in another Cas9. In some embodiments, the Cas9 variant contains one or more amino acid substitutions selected from E782K, N968K, and R1015H (collectively termed KHH) of saCas9 (SEQ ID NO: 218). In some embodiments, the Cas9 variant includes one or more amino acid substitutions selected from D1135M, S1136Q, G1218K, E1219S, R1335E, and T1337R (collectively termed “MQKSER”) of spCas9 (SEQ ID No: 197), or a corresponding mutation in another Cas9. In some embodiments, the Cas9 variant includes one or more amino acid substitutions selected from D1135M, S1136Q, G1218K, E1219S, R1335E, and T1337R (collectively termed “MQKSER”) of spCas9 (SEQ ID No: 197), or a corresponding mutation in another Cas9.

[0598] In some embodiments, a CRISPR protein-derived domain of a base editor comprises all or a portion (e.g., a functional portion) of a Cas9 protein with a canonical PAM sequence (NGG). In other embodiments, a Cas9-derived domain of a base editor can employ a non-canonical PAM sequence. Such sequences have been described in the art and would be apparent to the skilled artisan. For example, Cas9 domains that bind non-canonical PAM sequences have been described in Kleinstiver, B. P., et al., “Engineered CRISPR-Cas9 nucleases with altered PAM specificities” Nature 523, 481-485 (2015); and Kleinstiver, B. P., et al., “Broadening the targeting range of Staphylococcus aureus CRISPR-Cas9 by modifying PAM recognition” Nature Biotechnology 33, 1293-1298 (2015); R. T. Walton et al. “Unconstrained genome targeting with near-PAMless engineered CRISPR-Cas9 variants” Science 10.1126/science. aba8853 (2020); Hu et al. “Evolved Cas9 variants with broad PAM compatibility and high DNA specificity,” Nature, 2018 Apr. 5, 556 (7699), 57-63; Miller et al., “Continuous evolution of SpCas9 variants compatible with non-G PAMs” Nat. Biotechnol., 2020 April; 38 (4): 471-481; the entire contents of each are hereby incorporated by reference.

Fusion Proteins or Complexes Comprising a NapDNAbp and a Cytidine Deaminase and/or Adenosine Deaminase

[0599] Some aspects of the disclosure provide fusion proteins or complexes comprising a Cas9 domain or other nucleic acid programmable DNA binding protein (e.g., Cas12) and one or more cytidine deaminase, adenosine deaminase, or cytidine adenosine deaminase domains. It should be appreciated that the Cas9 domain may be any of the Cas9 domains or Cas9 proteins (e.g., dCas9 or nCas9) provided herein. In some embodiments, any of the Cas9 domains or Cas9 proteins (e.g., dCas9 or nCas9) provided herein may be fused with any of the cytidine deaminases and/or adenosine deaminases provided herein. The domains of the base editors disclosed herein can be arranged in any order.

[0600] In some embodiments, the fusion proteins or complexes comprising a cytidine deaminase or adenosine deaminase and a napDNAbp (e.g., Cas9 or Cas12 domain) do not include a linker sequence. In some embodiments, a linker is present between the cytidine or adenosine deaminase and the napDNAbp. In some embodiments, cytidine or adenosine deaminase and the napDNAbp are fused via any of the linkers provided herein. For example, in some embodiments the cytidine or adenosine deaminase and the napDNAbp are fused via any of the linkers provided herein.

[0601] It should be appreciated that the fusion proteins or complexes of the present disclosure may comprise one or more additional features. For example, in some embodiments, the fusion protein or complex may comprise inhibitors, cytoplasmic localization sequences, export sequences, such as nuclear export sequences, or other localization sequences, as well as sequence tags that are useful for solubilization, purification, or detection of the fusion proteins or complexes. Suitable protein tags provided herein include, but are not limited to, biotin carboxylase carrier protein (BCCP) tags, myc-tags, calmodulin-tags, FLAG-tags, hemagglutinin (HA)-tags, polyhistidine tags, also referred to as histidine tags or His-tags, maltose binding protein (MBP)-tags, nus-tags, glutathione-S-transferase (GST)-tags, green fluorescent protein (GFP)-tags, thioredoxin-tags, S-tags, Softags (e.g., Softag 1, Softag 3), strep-tags, biotin ligase tags, FlAsH tags, V5 tags, and SBP-tags. Additional suitable sequences will be apparent to those of skill in the art. In some embodiments, the fusion protein or complex comprises one or more His tags.

[0602] Exemplary, yet nonlimiting, fusion proteins are described in International PCT Application Nos. PCT/US2017/045381, PCT/US2019/044935, and PCT/US2020/016288, each of which is incorporated herein by reference for its entirety.

Fusion Proteins or Complexes with Internal Insertions

[0603] Provided herein are fusion proteins or complexes comprising a heterologous polypeptide fused to a nucleic acid programmable nucleic acid binding protein, for example, a napDNAbp.

[0604] The heterologous polypeptide can be fused to the napDNAbp at a C-terminal end of the napDNAbp, an N-terminal end of the napDNAbp, or inserted at an internal location of the napDNAbp. In some embodiments, the heterologous polypeptide is a deaminase (e.g., cytidine or adenosine deaminase) or a functional fragment thereof. For example, a fusion protein can comprise a deaminase flanked by an N-terminal fragment and a C-terminal fragment of a Cas9 or Cas12 (e.g., Cas12b/C2c1), polypeptide

[0605] The deaminase can be a circular permutant deaminase. In some embodiments, the deaminase is a circular permutant TadA, circularly permutated at amino acid residue 116, 136, or 65 as numbered in a TadA reference sequence.

[0606] The fusion protein or complexes can comprise more than one deaminase. The fusion protein or complex can comprise, for example, 1, 2, 3, 4, 5 or more deaminases. The deaminases in a fusion protein or complex can be adenosine deaminases, cytidine deaminases, or a combination thereof.

[0607] In some embodiments, the napDNAbp in the fusion protein or complex contains a Cas9 polypeptide or a fragment thereof. The Cas9 polypeptide can be a variant Cas9 polypeptide. The Cas9 polypeptide can be a circularly permuted Cas9 protein.

[0608] The heterologous polypeptide (e.g., deaminase) can be inserted in the napDNAbp (e.g., Cas9 or Cas12 (e.g., Cas12b/C2c1)) at a suitable location, for example, such that the napDNAbp retains its ability to bind the target polynucleotide and a guide nucleic acid. A deaminase (e.g., adenosine deaminase, cytidine deaminase, or adenosine deaminase and cytidine deaminase (dual deaminase)) can be inserted into a napDNAbp without compromising function of the deaminase (e.g., base editing activity) or the napDNAbp (e.g., ability to bind to target nucleic acid and guide nucleic acid).

[0609] In some embodiments, the deaminase (e.g., adenosine deaminase, cytidine deaminase, or adenosine deaminase and cytidine deaminase) is inserted in regions of the Cas9 polypeptide comprising higher than average B-factors (e.g., higher B factors compared to the total protein or the protein domain comprising the disordered region). Cas9 polypeptide positions comprising a higher than average B-factor can include, for example, residues 768, 792, 1052, 1015, 1022, 1026, 1029, 1067, 1040, 1054, 1068, 1246, 1247, and 1248 as numbered in the above Cas9 reference sequence. Cas9 polypeptide regions comprising a higher than average B-factor can include, for example, residues 792-872, 792-906, and 2-791 as numbered in the above Cas9 reference sequence.

[0610] In some embodiments, a heterologous polypeptide (e.g., deaminase) is inserted in a flexible loop of a Cas9 polypeptide. The flexible loop portions can be selected from the group consisting of 530-537, 569-570, 686-691, 943-947, 1002-1025, 1052-1077, 1232-1247, or 1298-1300 as numbered in the above Cas9 reference sequence, or a corresponding amino acid residue in another Cas9 polypeptide. The flexible loop portions can be selected from the group consisting of: 1-529, 538-568, 580-685, 692-942, 948-1001, 1026-1051, 1078-1231, or 1248-1297 as numbered in the above Cas9 reference sequence, or a corresponding amino acid residue in another Cas9 polypeptide.

[0611] A heterologous polypeptide (e.g., adenine deaminase) can be inserted into a Cas9 polypeptide region corresponding to amino acid residues: 1017-1069, 1242-1247, 1052-1056, 1060-1077, 1002-1003, 943-947, 530-537, 568-579, 686-691, 1242-1247, 1298-1300, 1066-1077, 1052-1056, or 1060-1077 as numbered in the above Cas9 reference sequence, or a corresponding amino acid residue in another Cas9 polypeptide.

[0612] A heterologous polypeptide (e.g., adenine deaminase) can be inserted in place of a deleted region of a Cas9 polypeptide. The deleted region can correspond to an N-terminal or C-terminal portion of the Cas9 polypeptide. Exemplary internal fusions base editors are provided in Table 4A below:

TABLE 4A
Insertion loci in Cas9 proteins

| BE ID | Modification | Other ID |
|---|---|---|
| IBE001 | Cas9 TadA ins 1015 | ISLAY01 |
| IBE002 | Cas9 TadA ins 1022 | ISLAY02 |
| IBE003 | Cas9 TadA ins 1029 | ISLAY03 |
| IBE004 | Cas9 TadA ins 1040 | ISLAY04 |
| IBE005 | Cas9 TadA ins 1068 | ISLAY05 |
| IBE006 | Cas9 TadA ins 1247 | ISLAY06 |
| IBE007 | Cas9 TadA ins 1054 | ISLAY07 |
| IBE008 | Cas9 TadA ins 1026 | ISLAY08 |
| IBE009 | Cas9 TadA ins 768 | ISLAY09 |
| IBE020 | delta HNH TadA 792 | ISLAY20 |
| IBE021 | N-term fusion single TadA helix truncated 165-end | ISLAY21 |
| IBE029 | TadA-Circular Permutant116 ins1067 | ISLAY29 |
| IBE031 | TadA- Circular Permutant 136 ins1248 | ISLAY31 |
| IBE032 | TadA- Circular Permutant 136ins 1052 | ISLAY32 |
| IBE035 | delta 792-872 TadA ins | ISLAY35 |
| IBE036 | delta 792-906 TadA ins | ISLAY36 |
| IBE043 | TadA-Circular Permutant 65 ins1246 | ISLAY43 |
| IBE044 | TadA ins C-term truncate2 791 | ISLAY44 |

[0613] A heterologous polypeptide (e.g., deaminase) can be inserted within a structural or functional domain of a Cas9 polypeptide. A heterologous polypeptide (e.g., deaminase) can be inserted between two structural or functional domains of a Cas9 polypeptide. A heterologous polypeptide (e.g., deaminase) can be inserted in place of a structural or functional domain of a Cas9 polypeptide, for example, after deleting the domain from the Cas9 polypeptide. The structural or functional domains of a Cas9 polypeptide can include, for example, RuvC I, RuvC II, RuvC III, Rec1, Rec2, PI, or HNH.

[0614] A fusion protein can comprise a linker between the deaminase and the napDNAbp polypeptide. The linker can be a peptide or a non-peptide linker. For example, the linker can be an XTEN, (GGGS) n (SEQ ID NO: 246), SGGSSGGS (SEQ ID NO: 330), (GGGGS) n (SEQ ID NO: 247), (G) n, (EAAAK) n (SEQ ID NO: 248), (GGS) n, SGSETPGTSESATPES (SEQ ID NO: 249). In some embodiments, the fusion protein comprises a linker between the N-terminal Cas9 fragment and the deaminase. In some embodiments, the fusion protein comprises a linker between the C-terminal Cas9 fragment and the deaminase. In some embodiments, the N-terminal and C-terminal fragments of napDNAbp are connected to the deaminase with a linker. In some embodiments, the N-terminal and C-terminal fragments are joined to the deaminase domain without a linker. In some embodiments, the fusion protein comprises a linker between the N-terminal Cas9 fragment and the deaminase but does not comprise a linker between the C-terminal Cas9 fragment and the deaminase. In some embodiments, the fusion protein comprises a linker between the C-terminal Cas9 fragment and the deaminase but does not comprise a linker between the N-terminal Cas9 fragment and the deaminase.

[0615] In some embodiments, the napDNAbp in the fusion protein or complex is a Cas12 polypeptide, e.g., Cas12b/C2c1, or a functional fragment thereof capable of associating with a nucleic acid (e.g., a gRNA) that guides the Cas12 to a specific nucleic acid sequence. The Cas12 polypeptide can be a variant Cas12 polypeptide. In other embodiments, the N- or C-terminal fragments of the Cas12 polypeptide comprise a nucleic acid programmable DNA binding domain or a RuvC domain. In other embodiments, the fusion protein contains a linker between the Cas12 polypeptide and the catalytic domain. In other embodiments, the amino acid sequence of the linker is GGSGGS (SEQ ID NO: 250) or GSSGSETPGTSESATPESSG (SEQ ID NO: 251). In other embodiments, the linker is a rigid linker. In other embodiments of the above aspects, the linker is encoded by GGAGGCTCTGGAGGAAGC (SEQ ID NO: 252) or GGCTCTTCTGGATCTGAAACACCTGGCACAAGCGAGAGCGCCACCCCTGAGAGCTCTGGC (SEQ ID NO: 253).

[0616] In other embodiments, the fusion protein or complex contains a nuclear localization signal (e.g., a bipartite nuclear localization signal). In other embodiments, the amino acid sequence of the nuclear localization signal is MAPKKKRKVGIHGVPAA (SEQ ID NO: 261). In other embodiments of the above aspects, the nuclear localization signal is encoded by the following sequence:

[0617] ATGGCCCCAAAGAAGAAGCGGAAGGTCGGTATCCACGGAGTCCCAGCAGCC (SEQ ID NO: 262). In other embodiments, the Cas12b polypeptide contains a mutation that silences the catalytic activity of a RuvC domain. In other embodiments, the Cas12b polypeptide contains D574A, D829A and/or D952A mutations.

[0618] In some embodiments, the fusion protein or complex comprises a napDNAbp domain (e.g., Cas12-derived domain) with an internally fused nucleobase editing domain (e.g., all or a portion (e.g., a functional portion) of a deaminase domain, e.g., an adenosine deaminase domain). In some embodiments, the napDNAbp is a Cas12b. In some embodiments, the base editor comprises a BhCas12b domain with an internally fused TadA*8 domain inserted at the loci provided in Table 4B below.

TABLE 4B
Insertion loci in Cas12b proteins

| | Insertion site | Inserted between aa |
|---|---|---|
| BhCas12b | | |
| position 1 | 153 | PS |
| position 2 | 255 | KE |
| position 3 | 306 | DE |
| position 4 | 980 | DG |
| position 5 | 1019 | KL |
| position 6 | 534 | FP |
| position 7 | 604 | KG |
| position 8 | 344 | HF |
| BvCas12b | | |
| position 1 | 147 | PD |
| position 2 | 248 | GG |
| position 3 | 299 | PE |
| position 4 | 991 | GE |
| position 5 | 1031 | KM |
| AaCas12b | | |
| position 1 | 157 | PG |
| position 2 | 258 | VG |
| position 3 | 310 | DP |
| position 4 | 1008 | GE |
| position 5 | 1044 | GK |

[0619] In some embodiments, the base editing system described herein is an ABE with TadA inserted into a Cas9. Polypeptide sequences of relevant ABEs with TadA inserted into a Cas9 are provided in the attached Sequence Listing as SEQ ID NOs: 263-308.

[0620] Exemplary, yet nonlimiting, fusion proteins are described in International PCT Application Nos. PCT/US2020/016285 and U.S. Provisional Application Nos. 62/852,228 and 62/852,224, the contents of which are incorporated by reference herein in their entireties.

### A to G Editing

[0621] In some embodiments, a base editor described herein comprises an adenosine deaminase domain. Such an adenosine deaminase domain of a base editor can facilitate the editing of an adenine (A) nucleobase to a guanine (G) nucleobase by deaminating the A to form inosine (I), which exhibits base pairing properties of G. In some embodiments, an A-to-G base editor further comprises an inhibitor of inosine base excision repair, for example, a uracil glycosylase inhibitor (UGI) domain or a catalytically inactive inosine specific nuclease. Without wishing to be bound by any particular theory, the UGI domain or catalytically inactive inosine specific nuclease can inhibit or prevent base excision repair of a deaminated adenosine residue (e.g., inosine), which can improve the activity or efficiency of the base editor.

[0622] A base editor comprising an adenosine deaminase can act on any polynucleotide, including DNA, RNA and DNA-RNA hybrids. In an embodiment an adenosine deaminase domain of a base editor comprises all or a portion (e.g., a functional portion) of an ADAT comprising one or more mutations which permit the ADAT to deaminate a target A in DNA. For example, the base editor can comprise all or a portion (e.g., a functional portion) of an ADAT from Escherichia coli (EcTadA) comprising one or more of the following mutations: D108N, A106V, D147Y, E155V, L84F, H123Y, 1156F, or a corresponding mutation in another ACTIVE 705096791v1 184 adenosine deaminase. Exemplary ADAT homolog polypeptide sequences are provided in the Sequence Listing as SEQ ID NOs: 1 and 309-315.

[0623] The adenosine deaminase can be derived from any suitable organism (e.g., E. coli). In some embodiments, the adenosine deaminase is from Escherichia coli, Staphylococcus aureus, Salmonella typhi, Shewanella putrefaciens, Haemophilus influenzae, Caulobacter crescentus, or Bacillus subtilis. In some embodiments, the adenine deaminase is a naturally-occurring adenosine deaminase that includes one or more mutations corresponding to any of the mutations provided herein (e.g., mutations in ecTadA). The corresponding residue in any homologous protein can be identified by e.g., sequence alignment and determination of homologous residues. The mutations in any naturally-occurring adenosine deaminase (e.g., having homology to ecTadA) that correspond to any of the mutations described herein (e.g., any of the mutations identified in ecTadA) can be generated accordingly.

[0624] In some embodiments, the adenosine deaminase comprises an amino acid sequence that is at least 60%, at least 65%, at least 70%, at least 75%, at least 80%, at least 85%, at least 90%, at least 95%, at least 96%, at least 97%, at least 98%, at least 99%, or at least 99.5% identical to any one of the amino acid sequences set forth in any of the adenosine deaminases provided herein. It should be appreciated that adenosine deaminases provided herein may include one or more mutations (e.g., any of the mutations provided herein). The disclosure provides any deaminase domains with a certain percent identify plus any of the mutations or combinations thereof described herein. In some embodiments, the adenosine deaminase comprises an amino acid sequence that has 1, 2, 3, 4, 5, 6, 7, 8, 9, 10, 11, 12, 13, 14, 15, 16, 17, 18, 19, 20, 21, 22, 21, 24, 25, 26, 27, 28, 29, 30, 31, 32, 33, 34, 35, 36, 37, 38, 39, 40, 41, 42, 43, 44, 45, 46, 47, 48, 49, 50, or more mutations compared to a reference sequence, or any of the adenosine deaminases provided herein.

[0625] It should be appreciated that any of the mutations provided herein (e.g., based on a TadA reference sequence, such as TadA*7.10 (SEQ ID NO: 1)) can be introduced into other adenosine deaminases, such as E. coli TadA (ecTadA), S. aureus TadA (saTadA), or other adenosine deaminases (e.g., bacterial adenosine deaminases). In some embodiments, the TadA reference sequence is TadA*7.10 (SEQ ID NO: 1). It would be apparent to the skilled artisan that additional deaminases may similarly be aligned to identify homologous amino acid residues that can be mutated as provided herein. Thus, any of the mutations identified in a TadA reference sequence can be made in other adenosine deaminases (e.g., ecTada) that have homologous amino acid residues. It should also be appreciated that any of the mutations provided herein can be made individually or in any combination in a TadA reference sequence or another adenosine deaminase.

[0626] In some embodiments, the adenosine deaminase comprises an alteration or set of alterations selected from those listed in Tables 5A-5E below:

TABLE 5A
Adenosine Deaminase Variants. Residue positions in the E. coli TadA variant (TadA*) are indicated.

| | 23 | 26 | 36 | 37 | 48 | 49 | 51 | 72 | 84 | 87 | 106 | 108 | 123 | 125 | 142 | 146 | 147 | 152 | 155 | 156 | 157 | 161 |
|---|---|---|---|---|---|---|---|---|---|---|---|---|---|---|---|---|---|---|---|---|---|---|
| TadA*0.1 | W | R | H | N | P | | R | N | L | S | A | D | H | G | A | S | D | R | E | I | K | K |
| TadA*0.2 | W | R | H | N | P | | R | N | L | S | A | D | H | G | A | S | D | R | E | I | K | K |
| TadA*1.1 | W | R | H | N | P | | R | N | L | S | A | N | H | G | A | S | D | R | E | I | K | K |
| TadA*1.2 | W | R | H | N | P | | R | N | L | S | V | N | H | G | A | S | D | R | E | I | K | K |
| TadA*2.1 | W | R | H | N | P | | R | N | L | S | V | N | H | G | A | S | Y | R | V | I | K | K |
| TadA*2.2 | W | R | H | N | P | | R | N | L | S | V | N | H | G | A | S | Y | R | V | I | K | K |
| TadA*2.3 | W | R | H | N | P | | R | N | L | S | V | N | H | G | A | S | Y | R | V | I | K | K |
| TadA*2.4 | W | R | H | N | P | | R | N | L | S | V | N | H | G | A | S | Y | R | V | I | K | K |
| TadA*2.5 | W | R | H | N | P | | R | N | L | S | V | N | H | G | A | S | Y | R | V | I | K | K |
| TadA*2.6 | W | R | H | N | P | | R | N | L | S | V | N | H | G | A | S | Y | R | V | I | K | K |
| TadA*2.7 | W | R | H | N | P | | R | N | L | S | V | N | H | G | A | S | Y | R | V | I | K | K |
| TadA*2.8 | W | R | H | N | P | | R | N | L | S | V | N | H | G | A | S | Y | R | V | I | K | K |
| TadA*2.9 | W | R | H | N | P | | R | N | L | S | V | N | H | G | A | S | Y | R | V | I | K | K |
| TadA*2.10 | W | R | H | N | P | | R | N | L | S | V | N | H | G | A | S | Y | R | V | I | K | K |
| TadA*2.11 | W | R | H | N | P | | R | N | L | S | V | N | H | G | A | S | Y | R | V | I | K | K |
| TadA*2.12 | W | R | H | N | P | | R | N | L | S | V | N | H | G | A | S | Y | R | V | I | K | K |
| TadA*3.1 | W | R | H | N | P | | R | N | F | S | V | N | Y | G | A | S | Y | R | V | F | K | K |
| TadA*3.2 | W | R | H | N | P | | R | N | F | S | V | N | Y | G | A | S | Y | R | V | F | K | K |
| TadA*3.3 | W | R | H | N | P | | R | N | F | S | V | N | Y | G | A | S | Y | R | V | F | K | K |
| TadA*3.4 | W | R | H | N | P | | R | N | F | S | V | N | Y | G | A | S | Y | R | V | F | K | K |
| TadA*3.5 | W | R | H | N | P | | R | N | F | S | V | N | Y | G | A | S | Y | R | V | F | K | K |
| TadA*3.6 | W | R | H | N | P | | R | N | F | S | V | N | Y | G | A | S | Y | R | V | F | K | K |
| TadA*3.7 | W | R | H | N | P | | R | N | F | S | V | N | Y | G | A | S | Y | R | V | F | K | K |
| TadA*3.8 | W | R | H | N | P | | R | N | F | S | V | N | Y | G | A | S | Y | R | V | F | K | K |
| TadA*4.1 | W | R | H | N | P | | R | N | L | S | V | N | H | G | N | S | Y | R | V | I | K | K |
| TadA*4.2 | W | G | H | N | P | | R | N | L | S | V | N | H | G | N | S | Y | R | V | I | K | K |
| TadA*4.3 | W | R | H | N | P | | R | N | F | S | V | N | Y | G | N | S | Y | R | V | F | K | K |
| TadA*5.1 | W | R | L | N | P | | L | N | F | S | V | N | Y | G | A | C | Y | R | V | F | N | K |
| TadA*5.2 | W | R | H | S | P | | R | N | F | S | V | N | Y | G | A | S | Y | R | V | F | K | T |
| TadA*5.3 | W | R | L | N | P | | L | N | I | S | V | N | Y | G | A | C | Y | R | V | F | N | K |
| TadA*5.4 | W | R | H | S | P | | R | N | F | S | V | N | Y | G | A | S | Y | R | V | F | K | T |
| TadA*5.5 | W | R | L | N | P | | L | N | F | S | V | N | Y | G | A | C | Y | R | V | F | N | K |
| TadA*5.6 | W | R | L | N | P | | L | N | F | S | V | N | Y | G | A | C | Y | R | V | F | N | K |
| TadA*5.7 | W | R | L | N | P | | L | N | F | S | V | N | Y | G | A | C | Y | R | V | F | N | K |
| TadA*5.8 | W | R | L | N | P | | L | N | F | S | V | N | Y | G | A | C | Y | R | V | F | N | K |
| TadA*5.9 | W | R | L | N | P | | L | N | F | S | V | N | Y | G | A | C | Y | R | V | F | N | K |
| TadA*5.10 | W | R | L | N | P | | L | N | F | S | V | N | Y | G | A | C | Y | R | V | F | N | K |
| TadA*5.11 | W | R | L | N | P | | L | N | F | S | V | N | Y | G | A | C | Y | R | V | F | N | K |
| TadA*5.12 | W | R | L | N | P | | L | N | F | S | V | N | Y | G | A | C | Y | R | V | F | N | K |
| TadA*5.13 | W | R | H | N | P | | L | D | F | S | V | N | Y | A | A | S | Y | R | V | F | K | K |
| TadA*5.14 | M | R | H | N | S | | L | N | F | C | V | N | Y | G | A | S | Y | R | V | F | K | K |
| TadA*6.1 | W | R | H | N | S | | L | N | F | S | V | N | Y | G | N | S | Y | R | V | F | K | K |
| TadA*6.2 | W | R | H | N | T | V | L | N | F | S | V | N | Y | G | N | S | Y | R | V | F | N | K |
| TadA*6.3 | M | R | L | N | S | | L | N | F | S | V | N | Y | G | A | C | Y | R | V | F | N | K |
| TadA*6.4 | W | R | L | N | S | | L | N | F | S | V | N | Y | G | N | C | Y | R | V | F | N | K |
| TadA*6.5 | M | R | L | N | T | V | L | N | F | S | V | N | Y | G | A | C | Y | R | V | F | N | K |
| TadA*6.6 | M | R | L | N | T | V | L | N | F | S | V | N | Y | G | N | C | Y | R | V | F | N | K |
| TadA*7.1 | W | R | L | N | A | | L | N | F | S | V | N | Y | G | A | C | Y | R | V | F | N | K |
| TadA*7.2 | M | R | L | N | A | | L | N | F | S | V | N | Y | G | N | C | Y | R | V | F | N | K |
| TadA*7.3 | L | R | L | N | A | | L | N | F | S | V | N | Y | G | A | C | Y | R | V | F | N | K |
| TadA*7.4 | R | R | L | N | A | | L | N | F | S | V | N | Y | G | A | C | Y | R | V | F | N | K |
| TadA*7.5 | W | R | L | N | A | | L | N | F | S | V | N | Y | G | A | C | Y | H | V | F | N | K |
| TadA*7.6 | W | R | L | N | A | | L | N | I | S | V | N | Y | G | A | C | Y | P | V | F | N | K |
| TadA*7.7 | L | R | L | N | A | | L | N | F | S | V | N | Y | G | A | C | Y | P | V | F | N | K |
| TadA*7.8 | L | R | L | N | A | | L | N | F | S | V | N | Y | G | N | C | Y | R | V | F | N | K |
| TadA*7.9 | L | R | L | N | A | | L | N | F | S | V | N | Y | G | N | C | Y | P | V | F | N | K |
| TadA*7.10 | R | R | L | N | A | | L | N | F | S | V | N | Y | G | A | C | Y | P | V | F | N | K |

TABLE 5B
Adenosine Deaminase Variants. Residue positions in the E. coli TadA variant
(TadA*) are indicated. Alterations are referenced to TadA*7.10 (first row).

| | 23 | 36 | 48 | 51 | 76 | 82 | 84 | 106 | 108 | 123 | 146 | 147 | 152 | 154 | 155 | 156 | 157 | 166 |
|---|---|---|---|---|---|---|---|---|---|---|---|---|---|---|---|---|---|---|
| TadA*7.10 | R | L | A | L | I | V | F | V | N | Y | C | Y | P | Q | V | F | N | T |
| TadA*8.1 | | | | | | | | | | | | T | | | | | | |
| TadA*8.2 | | | | | | | | | | | | R | | | | | | |
| TadA*8.3 | | | | | | | | | | | | | | S | | | | |
| TadA*8.4 | | | | | | | | | | H | | | | | | | | |
| TadA*8.5 | | | | | | S | | | | | | | | | | | | |
| TadA*8.6 | | | | | | | | | | | | | | | | | | R |
| TadA*8.7 | | | | | | | | | | | | | | R | | | | |
| TadA*8.8 | | | | | | | | | | H | | R | | R | | | | |
| TadA*8.9 | | | | | Y | | | | | | | R | | R | | | | |
| TadA*8.10 | | | | | | | | | | | | R | | R | | | | R |
| TadA*8.11 | | | | | | | | | | | | T | | R | | | | |
| TadA*8.12 | | | | | | | | | | | | T | | S | | | | |
| TadA*8.13 | | | | | Y | | | | | H | | R | | R | | | | |
| TadA*8.14 | | | | | Y | S | | | | | | | | | | | | |
| TadA*8.15 | | | | | | S | | | | | | R | | | | | | |
| TadA*8.16 | | | | | | S | | | | H | | R | | | | | | |
| TadA*8.17 | | | | | | S | | | | | | | | R | | | | |
| TadA*8.18 | | | | | | S | | | | H | | | | R | | | | |
| TadA*8.19 | | | | | | S | | | | H | | R | | R | | | | |
| TadA*8.20 | | | | | Y | S | | | | H | | R | | R | | | | |
| TadA*8.21 | | | | | | | | | | | | R | | S | | | | |
| TadA*8.22 | | | | | | S | | | | | | | | S | | | | |
| TadA*8.23 | | | | | | S | | | | H | | | | | | | | |
| TadA*8.24 | | | | | | S | | | | H | | T | | | | | | |

TABLE 5C
Adenosine Deaminase Variants. Alterations are referenced
to TadA*7.10. Additional details of TadA*9 adenosine
deaminases are described in International PCT Application
No. PCT/US2020/049975, which is incorporated herein
by reference in its entirety for all purposes.

| TadA*9 | |
|---|---|
| Description | Alterations |
| TadA*9.1 | E25F, V82S, Y123H, T133K, Y147R, Q154R |
| TadA*9.2 | E25F, V82S, Y123H, Y147R, Q154R |
| TadA*9.3 | V82S, Y123H, P124W, Y147R, Q154R |
| TadA*9.4 | L51W, V82S, Y123H, C146R, Y147R, Q154R |
| TadA*9.5 | P54C, V82S, Y123H, Y147R, Q154R |
| TadA*9.6 | Y73S, V82S, Y123H, Y147R, Q154R |
| TadA*9.7 | N38G, V82T, Y123H, Y147R, Q154R |
| TadA*9.8 | R23H, V82S, Y123H, Y147R, Q154R |
| TadA*9.9 | R21N, V82S, Y123H, Y147R, Q154R |
| TadA*9.10 | V82S, Y123H, Y147R, Q154R, A158K |
| TadA*9.11 | N72K, V82S, Y123H, D139L, Y147R, Q154R, |
| TadA*9.12 | E25F, V82S, Y123H, D139M, Y147R, Q154R |
| TadA*9.13 | M70V, V82S, M94V, Y123H, Y147R, Q154R |
| TadA*9.14 | Q71M, V82S, Y123H, Y147R, Q154R |
| TadA*9.15 | E25F, V82S, Y123H, T133K, Y147R, Q154R |
| TadA*9.16 | E25F, V82S, Y123H, Y147R, Q154R |
| TadA*9.17 | V82S, Y123H, P124W, Y147R, Q154R |
| TadA*9.18 | L51W, V82S, Y123H, C146R, Y147R, Q154R |
| TadA*9.19 | P54C, V82S, Y123H, Y147R, Q154R |
| TadA*9.2 | Y73S, V82S, Y123H, Y147R, Q154R |
| TadA*9.21 | N38G, V82T, Y123H, Y147R, Q154R |
| TadA*9.22 | R23H, V82S, Y123H, Y147R, Q154R |
| TadA*9.23 | R21N, V82S, Y123H, Y147R, Q154R |
| TadA*9.24 | V82S, Y123H, Y147R, Q154R, A158K |
| TadA*9.25 | N72K, V82S, Y123H, D139L, Y147R, Q154R, |
| TadA*9.26 | E25F, V82S, Y123H, D139M, Y147R, Q154R |
| TadA*9.27 | M70V, V82S, M94V, Y123H, Y147R, Q154R |
| TadA*9.28 | Q71M, V82S, Y123H, Y147R, Q154R |
| TadA*9.29 | E25F_I76Y_V82S_Y123H_Y147R_Q154R |
| TadA*9.30 | I76Y_V82T_Y123H_Y147R_Q154R |
| TadA*9.31 | N38G_I76Y_V82S_Y123H_Y147R_Q154R |
| TadA*9.32 | N38G_I76Y_V82T_Y123H_Y147R_Q154R |
| TadA*9.33 | R23H_I76Y_V82S_Y123H_Y147R_Q154R |
| TadA*9.34 | P54C_I76Y_V82S_Y123H_Y147R_Q154R |
| TadA*9.35 | R21N_I76Y_V82S_Y123H_Y147R_Q154R |
| TadA*9.36 | I76Y_V82S_Y123H_D138M_Y147R_Q154R |
| TadA*9.37 | Y72S_I76Y_V82S_Y123H_Y147R_Q154R |
| TadA*9.38 | E25F_I76Y_V82S_Y123H_Y147R_Q154R |
| TadA*9.39 | I76Y_V82T_Y123H_Y147R_Q154R |
| TadA*9.40 | N38G_I76Y_V82S_Y123H_Y147R_Q154R |
| TadA*9.41 | N38G_I76Y_V82T_Y123H_Y147R_Q154R |
| TadA*9.42 | R23H_I76Y_V82S_Y123H_Y147R_Q154R |
| TadA*9.43 | P54C_I76Y_V82S_Y123H_Y147R_Q154R |
| TadA*9.44 | R21N_I76Y_V82S_Y123H_Y147R_Q154R |
| TadA*9.45 | I76Y_V82S_Y123H_D138M_Y147R_Q154R |
| TadA*9.46 | Y72S_I76Y_V82S_Y123H_Y147R_Q154R |
| TadA*9.47 | N72K_V82S, Y123H, Y147R, Q154R |
| TadA*9.48 | Q71M_V82S, Y123H, Y147R, Q154R |
| TadA*9.49 | M70V, V82S, M94V, Y123H, Y147R, Q154R |
| TadA*9.50 | V82S, Y123H, T133K, Y147R, Q154R |
| TadA*9.51 | V82S, Y123H, T133K, Y147R, Q154R, A158K |
| TadA*9.52 | M70V, Q71M, N72K, V82S, Y123H, Y147R, Q154R |
| TadA*9.53 | N72K_V82S, Y123H, Y147R, Q154R |
| TadA*9.54 | Q71M_V82S, Y123H, Y147R, Q154R |
| TadA*9.55 | M70V, V82S, M94V, Y123H, Y147R, Q154R |
| TadA*9.56 | V82S, Y123H, T133K, Y147R, Q154R |
| TadA*9.57 | V82S, Y123H, T133K, Y147R, Q154R, A158K |
| TadA*9.58 | M70V, Q71M, N72K, V82S, Y123H, Y147R, Q154R |

[0627] In some embodiments, the adenosine deaminase comprises one or more of M1I, S2A, S2E, V4D, V4E, V4M, F6S, H8E, H8Y, E9Y, M12S, R13H, R13I, R13Y, T17L, T17S, L18A, L18E, A19N, R21N, K20K, K20R, R21A, G22P, W23D, R23H, W23G, W23Q, W23L, W23R, D24E, D24G, E25F, E25M, E25D, E25A, E25G, E25R, E25V, E25S, E25Y, R26D, R26E, R26G, R26N, R26Q, R26C, R26L, R26K, R26W, E27V, E27D, P29V, V30G, L34S, L34V, L36H, H36L, H36N, N37N, N37T, N37S, N38G, N38R, W45A, W45L, W45N, N46N, R46W, R46F, R46Q, R46M, R47A, R47Q, R47F, R47K, R47P, R47W, R47M, P48T, P48L, P48A, P48I, P48S, 149G, 149H, 149V, 149F, 149H, G50L, R51H, R51L, R5IN, L51W, R51Y, H52D, H52Y, D53P, P54C, P54T, A55H, T55A, A56E, A56S, E59A, E59G, E59I, E59Q, E59W, M61A, M61I, M61L, M61V, L63S, L63V, Q65V, G66C, G67D, G67L, G67V, L68Q, M70H, M70Q, L84F, M70V, M70L, E70A, M70V, Q71M, Q7IN, Q71L, Q71R, N72A, N72K, N72S, N72D, N72Y, Y73G, Y73I, Y73K, Y73R, Y73S, R74A, R74Q, R74G, R74K, R74L, R74N, I76D, I76F, 1761, 176N, I76T, I76Y, D77G, A78I, T79M, L80M, L80Y, V82A, V82S, V82G, V82T, L84E, L84F, L84Y, E85K, E85G, E85P, E85S, S87C, S87L, S87V, V88A, V88M, C90S, A91A, A91G, A91S, A91V, A91T, G92T, A93I, M94A, M94V, M94L, M94I, M94H, 195S, 195G, 195L, 195H, 195V, H96A, H96L, H96R, H96S, S97C, S97G, S97I, S97M, S97R, S97S, R98K, R98I, R98N, R98Q, G100R, G100V, R101V, R101R, V102A, V102F, V102I, V102V, D103A, F104G, D104N, F104V, F104I, F104L, A106T, V106Q, V106F, V106W, V106M, A106A, A106Q, A106F, A106G, A106W, A106M, A106V, A106R, R107C, R107G, R107P, R107K, R107A, R107N, R107W, R107H, R107S, D108N, D108F, D108G, D108V, D108A, D108Y, D108H, D108I, D108K, D108L, D108M, D108Q, N108Q, N108F, N108W, N108M, N108K, D108K, D108F, D108M, D108Q, D108R, D108W, D108S, A109H, A109K, A109R, A109S, A109T, A109V, K110G, K110H, K110I, K11OR, K110T, T111A, T111G, T111H, T111R, G112A, A114G, A114H, A114V, G115S, L117M, L117N, L117V, M118D, M118G, M118K, M118N, M118V, D119L, D119N, D119S, D119V, V120H, V120L, H122H, H122N, H122P, H122R, H122S, H122Y, H123C, H123G, H123P, H123V, H123Y, Y123H, P124G, P124I, P124L, P124W, G125H, G125I, G125A, G125M, G125K, M126D, M126H, M126K, M126I, M126N, M1260, M126S, M126Y, N127H, N127S, N127D, N127K, N127R, H128R, R129H, R129Q, R129V, R129I, R129E, R129V, 11321, 1132F, T133V, T133E, T133G, T133K, E134A, E134E, E134G, E134I, G135G, G135V, 1136G, 1136L, 1136T, 1137A, 1137D, 1137E, L137M, 1137S, A138D, A138E, A138G, S138A, A138N, A138S, A138T, A138V, A138Y, D139E, D139I, D139C, D139L, D139M, E140A, E140C, E140L, E140R, A142N, A142D, A142G, A142A, A142L, A142S, A142T, A142N, A142S, A142V, A143D, A143E, A143G, A143D, A143G, A143E, A143L, A143W, A143M, A143S, A143Q, A143R, C146R, S146A, S146C, S146D, S146F, S146R, S146T, D147D, D147L, D147F, D147G, D147Y, Y147T, Y147R, Y147D, D147R, F148L, F148F, F148R, F148Y, F149C, F149M, F149R, F149Y, M151F, M151P, M151R, M151V, R152C, R152F, R152H, R152P, R152R, R153C, R153Q, R153R, R153V, Q154E, Q154H, Q154M, Q154R, Q154L, Q154S, Q154V, E155F, E155G, E155I, E155K, E155P, E155V, E155D, 1156A, 1156F, 1156D, 1156K, 1156N, 1156R, 1156Y, E157A, E157F, E1571, E157P, E157T, E157V, N157K, K157N, K157R, A158Q, A158K, A158V, Q159F, Q159K, Q159L, Q159N, K160A, K160S, K160E, K160K, K160N, K161I, K161A, K16IN, K161Q, K161S, K161T, A162D, A162Q, R162H, R162P, A162S, Q163G, Q163H, Q163N, Q163R, S164I, S164R, S164Y, S165A, S165D, S165I, S165T, S165Y, T166D, T166K, T166I, T166N, T166P, T166R, D167S and/or D167N mutation in a TadA reference sequence (e.g., TadA*7.10,ecTadA, or TadA8e), and any alternative mutation at the corresponding position, or any substitution from R26, W23, E27, H36, R47, P48, R51, H52, R74, 176, V82, V88, M94, 195, H96, A106, D108, A109, K110, T111, A114, D119, H122, H123, M126, N127, A142, S146, D147, F149, R152, Q154, E155, 1156, E157, K161, T166, and/or D167, with respect to a TadA reference sequence, or a substitution of 2-50 amino acids in a TadA reference sequence, which may be selected from W23R, E27D, H36L, R47K, P48A, R51H, R51L, I76F, I76Y, V82S, A106V, D108G, A109S, K110R, T111H, A114V, D119N, H122R, H122N, H123Y, M126I, N127K, S146C, D147R, R152P, Q154R, E155V, 1156F, K157N, K161N, T166I, and D167N, or one or more corresponding mutations in another adenosine deaminase. Additional mutations are described in U.S. Patent Application Publication No. 2022/0307003 A1 and International Patent Application Publications No. WO 2023/288304 A2 and WO 2023/034959 A2, the disclosures of which are incorporated herein by reference in their entirety for all purposes.

[0628] In embodiments, a variant of TadA*7.10 comprises one or more alterations selected from any of those alterations provided herein.

[0629] In particular embodiments, an adenosine deaminase heterodimer comprises a TadA*8 domain and an adenosine deaminase domain selected from Staphylococcus aureus (S. aureus) TadA, Bacillus subtilis (B. subtilis) TadA, Salmonella typhimurium (S. typhimurium) TadA, Shewanella putrefaciens (S. putrefaciens) TadA, Haemophilus influenzae F3031 (H. influenzae) TadA, Caulobacter crescentus (C. crescentus) TadA, Geobacter sulfurreducens (G. sulfurreducens) TadA, or TadA*7.10.

[0630] In some embodiments, the TadA*8 is a variant as shown in Table 5D. Table 5D shows certain amino acid position numbers in the TadA amino acid sequence and the amino acids present in those positions in the TadA-7.10 adenosine deaminase. Table 5D also shows amino acid changes in TadA variants relative to TadA-7.10 following phage-assisted non-continuous evolution (PANCE) and phage-assisted continuous evolution (PACE), as described in M. Richter et al., 2020, Nature Biotechnology, doi.org/10.1038/s41587-020-0453-z, the entire contents of which are incorporated by reference herein. In some embodiments, the TadA*8 is TadA*8a, TadA*8b, TadA*8c, TadA*8d, or TadA*8e. In some embodiments, the TadA*8 is TadA*8e. In one embodiment, an adenosine deaminase is a TadA*8 that comprises or consists essentially of SEQ ID NO: 316 or a fragment thereof having adenosine deaminase activity.

TABLE 5D
Select TadA*8 Variants

| | | TadA amino acid number | | | | | | | | | |
|---|---|---|---|---|---|---|---|---|---|---|---|
| | TadA | 26 | 88 | 109 | 111 | 119 | 122 | 147 | 149 | 166 | 167 |
| | TadA-7.10 | R | V | A | T | D | H | Y | F | T | D |
| PANCE 1 | | | | | R | | | | | | |
| PANCE 2 | | | | S/T | R | | | | | | |
| PACE | TadA-8a | C | | S | R | N | N | D | Y | I | N |
| | TadA-8b | | A | S | R | N | N | | Y | I | N |
| | TadA-8c | C | | S | R | N | N | | Y | I | N |
| | TadA-8d | | A | | R | N | | | Y | | |
| | TadA-8e | | | S | R | N | N | D | Y | I | N |

[0631] In some embodiments, the TadA variant is a variant as shown in Table 5E. Table 5E shows certain amino acid position numbers in the TadA amino acid sequence and the amino acids present in those positions in the TadA*7.10 adenosine deaminase. In some embodiments, the TadA variant is MSP605, MSP680, MSP823, MSP824, MSP825, MSP827, MSP828, or MSP829. In some embodiments, the TadA variant is MSP828. In some embodiments, the TadA variant is MSP829.

TABLE 5E
TadA Variants

| | TadA Amino Acid Number | | | | | | | |
|---|---|---|---|---|---|---|---|---|
| Variant | 36 | 76 | 82 | 147 | 149 | 154 | 157 | 167 |
| TadA-7.10 | L | I | V | Y | F | Q | N | D |
| MSP605 | | | G | T | | S | | |
| MSP680 | | Y | G | T | | S | | |
| MSP823 | H | | G | T | | S | K | |
| MSP824 | | | G | D | Y | S | | N |
| MSP825 | H | | G | D | Y | S | K | N |
| MSP827 | H | Y | G | T | | S | K | |
| MSP828 | | Y | G | D | Y | S | | N |
| MSP829 | H | Y | G | D | Y | S | K | N |

[0632] In particular embodiments, the fusion proteins or complexes comprise a single (e.g., provided as a monomer) TadA* (e.g., TadA*8 or TadA*9). Throughout the present disclosure, an adenosine deaminase base editor that comprises a single TadA* domain is indicates using the terminology ABEm or ABE #m, where “#” is an identifying number (e.g., ABE8.20m), where “m” indicates “monomer.” In some embodiments, the TadA* is linked to a Cas9 nickase. In some embodiments, the fusion proteins or complexes of the disclosure comprise as a heterodimer of a wild-type TadA (TadA (wt)) linked to a TadA*. Throughout the present disclosure, an adenosine deaminase base editor that comprises a single TadA* domain and a TadA (wt) domain is indicates using the terminology ABEd or ABE #d, where “#” is an identifying number (e.g., ABE8.20d), where “d” indicates “dimer.” In other embodiments, the fusion proteins or complexes of the disclosure comprise as a heterodimer of a TadA*7.10 linked to a TadA*. In some embodiments, the base editor is ABE8 comprising a TadA* variant monomer. In some embodiments, the base editor is ABE comprising a heterodimer of a TadA* and a TadA (wt). In some embodiments, the base editor is ABE comprising a heterodimer of a TadA* and TadA*7.10. In some embodiments, the base editor is ABE comprising a heterodimer of a TadA*. In some embodiments, the TadA* is selected from Tables 5A-5E.

[0633] In some embodiments, the adenosine deaminase is expressed as a monomer. In other embodiments, the adenosine deaminase is expressed as a heterodimer. In some embodiments, the deaminase or other polypeptide sequence lacks a methionine, for example when included as a component of a fusion protein. This can alter the numbering of positions. However, the skilled person will understand that such corresponding mutations refer to the same mutation.

[0634] Any of the mutations provided herein and any additional mutations (e.g., based on the ecTadA amino acid sequence) can be introduced into any other adenosine deaminases. Any of the mutations provided herein can be made individually or in any combination in a TadA reference sequence or another adenosine deaminase (e.g., ecTadA).

[0635] Details of A to G nucleobase editing proteins are described in International PCT Application No. PCT/US2017/045381 (WO2018/027078) and Gaudelli, N. M., et al., “Programmable base editing of A·T to G·C in genomic DNA without DNA cleavage” Nature, 551, 464-471 (2017), the entire contents of which are hereby incorporated by reference.

### C to T Editing

[0636] In some embodiments, a base editor disclosed herein comprises a fusion protein or complex comprising cytidine deaminase capable of deaminating a target cytidine (C) base of a polynucleotide to produce uridine (U), which has the base pairing properties of thymine. In some embodiments, for example where the polynucleotide is double-stranded (e.g., DNA), the uridine base can then be substituted with a thymidine base (e.g., by cellular repair machinery) to give rise to a C:G to a T:A transition. In other embodiments, deamination of a C to U in a nucleic acid by a base editor cannot be accompanied by substitution of the U to a T.

[0637] The deamination of a target C in a polynucleotide to give rise to a U is a non-limiting example of a type of base editing that can be executed by a base editor described herein. In another example, a base editor comprising a cytidine deaminase domain can mediate conversion of a cytosine (C) base to a guanine (G) base. For example, a U of a polynucleotide produced by deamination of a cytidine by a cytidine deaminase domain of a base editor can be excised from the polynucleotide by a base excision repair mechanism (e.g., by a uracil DNA glycosylase (UDG) domain), producing an abasic site. The nucleobase opposite the abasic site can then be substituted (e.g., by base repair machinery) with another base, such as a C, by for example a translesion polymerase. Although it is typical for a nucleobase opposite an abasic site to be replaced with a C, other substitutions (e.g., A, G or T) can also occur.

[0638] Accordingly, in some embodiments a base editor described herein comprises a deamination domain (e.g., cytidine deaminase domain) capable of deaminating a target C to a U in a polynucleotide. Further, as described below, the base editor can comprise additional domains which facilitate conversion of the U resulting from deamination to, in some embodiments, a T or a G. For example, a base editor comprising a cytidine deaminase domain can further comprise a uracil glycosylase inhibitor (UGI) domain to mediate substitution of a U by a T, completing a C-to-T base editing event. In another example, the base editor can comprise a uracil stabilizing protein as described herein. In another example, a base editor can incorporate a translesion polymerase to improve the efficiency of C-to-G base editing, since a translesion polymerase can facilitate incorporation of a C opposite an abasic site (i.e., resulting in incorporation of a G at the abasic site, completing the C-to-G base editing event).

[0639] A base editor comprising a cytidine deaminase as a domain can deaminate a target C in any polynucleotide, including DNA, RNA and DNA-RNA hybrids.

[0640] In some embodiments, a cytidine deaminase of a base editor comprises all or a portion (e.g., a functional portion) of an apolipoprotein B mRNA editing complex (APOBEC) family deaminase. APOBEC is a family of evolutionarily conserved cytidine deaminases. Members of this family are C-to-U editing enzymes. The N-terminal domain of APOBEC like proteins is the catalytic domain, while the C-terminal domain is a pseudocatalytic domain. More specifically, the catalytic domain is a zinc dependent cytidine deaminase domain and is important for cytidine deamination. APOBEC family members include APOBEC1, APOBEC2, APOBEC3A, APOBEC3B, APOBEC3C, APOBEC3D (“APOBEC3E” now refers to this), APOBEC3F, APOBEC3G, APOBEC3H, APOBEC4, and Activation-induced (cytidine) deaminase.

[0641] Other exemplary deaminases that can be fused to Cas9 according to aspects of this disclosure are provided below. In embodiments, the deaminases are activation-induced deaminases (AID). It should be understood that, in some embodiments, the active domain of the respective sequence can be used, e.g., the domain without a localizing signal (nuclear localization sequence, without nuclear export signal, cytoplasmic localizing signal).

[0642] Some aspects of the present disclosure are based on the recognition that modulating the deaminase domain catalytic activity of any of the fusion proteins or complexes described herein, for example by making point mutations in the deaminase domain, affect the processivity of the fusion proteins (e.g., base editors) or complexes. For example, mutations that reduce, but do not eliminate, the catalytic activity of a deaminase domain within a base editing fusion protein or complexes can make it less likely that the deaminase domain will catalyze the deamination of a residue adjacent to a target residue, thereby narrowing the deamination window. The ability to narrow the deamination window can prevent unwanted deamination of residues adjacent to specific target residues, which can decrease or prevent off-target effects.

[0643] In some embodiments, an APOBEC deaminase incorporated into a base editor can comprise one or more mutations selected from the group consisting of H121R, H122R, R126A, R126E, R118A, W90A, W90Y, and R132E of rAPOBEC1; D316R, D317R, R320A, R320E, R313A, W285A, W285Y, and R326E of hAPOBEC3G; and any alternative mutation at the corresponding position, or one or more corresponding mutations in another APOBEC deaminase.

[0644] A number of modified cytidine deaminases are commercially available, including, but not limited to, SaBE3, SaKKH-BE3, VQR-BE3, EQR-BE3, VRER-BE3, YE1-BE3, EE-BE3, YE2-BE3, and YEE-BE3, which are available from Addgene (plasmids 85169, 85170, 85171, 85172, 85173, 85174, 85175, 85176, 85177). In some embodiments, a deaminase incorporated into a base editor comprises all or a portion (e.g., a functional portion) of an APOBEC1 deaminase.

[0645] In some embodiments, the fusion proteins or complexes of the disclosure comprise one or more cytidine deaminase domains. In some embodiments, the cytidine deaminases provided herein are capable of deaminating cytosine or 5-methylcytosine to uracil or thymine. In some embodiments, the cytidine deaminases provided herein are capable of deaminating cytosine in DNA. The cytidine deaminase may be derived from any suitable organism. In some embodiments, the cytidine deaminase is a naturally-occurring cytidine deaminase that includes one or more mutations corresponding to any of the mutations provided herein. One of skill in the art will be able to identify the corresponding residue in any homologous protein, e.g., by sequence alignment and determination of homologous residues. Accordingly, one of skill in the art would be able to generate mutations in any naturally-occurring cytidine deaminase that corresponds to any of the mutations described herein. In some embodiments, the cytidine deaminase is from a prokaryote. In some embodiments, the cytidine deaminase is from a bacterium. In some embodiments, the cytidine deaminase is from a mammal (e.g., human).

[0646] In some embodiments, the cytidine deaminase comprises an amino acid sequence that is at least 60%, at least 65%, at least 70%, at least 75%, at least 80%, at least 85%, at least 90%, at least 95%, at least 96%, at least 97%, at least 98%, at least 99%, or at least 99.5% identical to any one of the cytidine deaminase amino acid sequences set forth herein. It should be appreciated that cytidine deaminases provided herein may include one or more mutations (e.g., any of the mutations provided herein). Some embodiments provide a polynucleotide molecule encoding the cytidine deaminase nucleobase editor polypeptide of any previous aspect or as delineated herein. In some embodiments, the polynucleotide is codon optimized.

[0647] In embodiments, a fusion protein of the disclosure comprises two or more nucleic acid editing domains.

[0648] Details of C to T nucleobase editing proteins are described in International PCT Application No. PCT/US2016/058344 (WO2017/070632) and Komor, A. C., et al., “Programmable editing of a target base in genomic DNA without double-stranded DNA cleavage” Nature 533, 420-424 (2016), the entire contents of which are hereby incorporated by reference.

### Cytidine Adenosine Base Editors (CABEs)

[0649] In some embodiments, a base editor described herein comprises an adenosine deaminase variant that has increased cytidine deaminase activity. Such base editors may be referred to as “cytidine adenosine base editors (CABEs)” or “cytosine base editors derived from TadA* (CBE-Ts),” and their corresponding deaminase domains may be referred to as “TadA* acting on DNA cytosine (TADC)” domains. In some instances, an adenosine deaminase variant has both adenine and cytosine deaminase activity (i.e., is a dual deaminase). In some embodiments, the adenosine deaminase variants deaminate adenine and cytosine in DNA. In some embodiments, the adenosine deaminase variants deaminate adenine and cytosine in single-stranded DNA. In some embodiments, the adenosine deaminase variants deaminate adenine and cytosine in RNA. In some embodiments, the adenosine deaminase variant predominantly deaminates cytosine in DNA and/or RNA (e.g., greater than 30%, 40%, 50%, 60%, 70%, 80%, 90%, 95%, or 99% of all deaminations catalyzed by the adenosine deaminase variant, or the number of cytosine deaminations catalyzed by the variant is about or at least about 2-fold, 3-fold, 4-fold, 5-fold, 6-fold, 7-fold, 8-fold, 9-fold, 10-fold, 25-fold, 50-fold, 75-fold, 100-fold, 500-fold, or 1,000-fold greater than the number adenine deaminations catalyzed by the variant). In some embodiments, the adenosine deaminase variant has approximately equal cytosine and adenosine deaminase activity (e.g., the two activities are within about 10% or 20% of each other). In some embodiments, the adenosine deaminase variant has predominantly cytosine deaminase activity, and little, if any, adenosine deaminase activity. In some embodiments, the adenosine deaminase variant has cytosine deaminase activity, and no significant or no detectable adenosine deaminase activity. In some embodiments, the target polynucleotide is present in a cell in vitro or in vivo. In some embodiments, the cell is a bacteria, yeast, fungi, insect, plant, or mammalian cell.

[0650] In some embodiments, the CABE comprises a bacterial TadA deaminase variant (e.g., ecTadA). In some embodiments, the CABE comprises a truncated TadA deaminase variant. In some embodiments, the CABE comprises a fragment of a TadA deaminase variant. In some embodiments, the CABE comprises a TadA*8.20 variant.

[0651] In some embodiments, an adenosine deaminase variant of the disclosure is a TadA adenosine deaminase comprising one or more alterations that increase cytosine deaminase activity (e.g., at least about 10-fold, 20-fold, 30-fold, 40-fold, 50-fold, 60-fold, 70-fold or more increase) while maintaining adenosine deaminase activity (e.g., at least about 30%, 40%, 50% or more of the activity of a reference adenosine deaminase (e.g., TadA*8.20 or TadA*8.19)). In some instances, the adenosine deaminase variant comprises one or more alterations that increase cytosine deaminase activity (e.g., at least about 10-fold, 20-fold, 30-fold, 40-fold, 50-fold, 60-fold, 70-fold or more increase) relative to the activity of a reference adenosine deaminase and comprise undetectable adenosine deaminase activity or adenosine deaminase activity that is less than 30%, 20%, 10%, or 5% of that of a reference adenosine deaminase. In some embodiments, the reference adenosine deaminase is TadA*8.20 or TadA*8.19.

[0652] In some embodiments, the adenosine deaminase variant is an adenosine deaminase comprising two or more alterations at an amino acid position selected from the group consisting of 2, 4, 6, 8, 13, 17, 23, 27, 29, 30, 47, 48, 49, 67, 76, 77, 82, 84, 96, 100, 107, 112, 114, 115, 118, 119, 122, 127, 142, 143, 147, 149, 158, 159, 162 165, 166, and 167, of an amino acid sequence having at least about 70%, 75%, 80%, 85%, 90%, 95%, 98%, 99% or greater identity to SEQ ID NO: 1, or a corresponding alteration in another deaminase. I

[0653] In some embodiments, the adenosine deaminase variant is an adenosine deaminase comprising one or more alterations selected from the group consisting of S2H, V4K, V4S, V4T, V4Y, F6G, F6H, F6Y, H8Q, R13G, T17A, T17W, R23Q, E27C, E27G, E27H, E27K, E27Q, E27S, E27G, P29A, P29G, P29K, V30F, V30I, R47G, R47S, A48G, 149K, 149M, 149N, 149Q, I49T, G67W, I76H, I76R, 176W, Y76H, Y76R, Y76W, F84A, F84M, H96N, G100A, G100K, T111H, G112H, A114C, G115M, M118L, H122G, H122R, H122T, N127I, N127K, N127P, A142E, R147H, A158V, Q159S, A162C, A162N, A162Q, and S165P of an amino acid sequence having at least about 70%, 75%, 80%, 85%, 90%, 95%, 98%, 99% or greater identity to SEQ ID NO: 1, or a corresponding alteration in another deaminase.

[0654] In some embodiments, the adenosine deaminase variant is an adenosine deaminase comprising an amino acid alteration or combination of amino acid alterations selected from those listed in any of Tables 6A-6F.

[0655] The residue identity of exemplary adenosine deaminase variants that are capable of deaminating adenine and/or cytidine in a target polynucleotide (e.g., DNA) is provided in Tables 6A-6F below. Further examples of adenosine deaminase variants include the following variants of 1.17 (see Table 6A): 1.17+E27H; 1.17+E27K; 1.17+E27S; 1.17+E27S+I49K; 1.17+E27G; 1.17+149N; 1.17+E27G+149N; and 1.17+E27Q. In some embodiments, any of the amino acid alterations provided herein are substituted with a conservative amino acid. Additional mutations known in the art can be further added to any of the adenosine deaminase variants provided herein.

[0656] In some embodiments, the base editor systems comprising a CABE provided herein have at least about a 30%, 40%, 50%, 60%, 70% or more C to T editing activity in a target polynucleotide (e.g., DNA). In some embodiments, a base editor system comprising a CABE as provided herein has an increased C to T base editing activity (e.g., increased at least about 30-fold, 40-fold, 50-fold, 60-fold, 70-fold or more) relative to a reference base editor system comprising a reference adenosine deaminase (e.g., TadA*8.20 or TadA*8.19).

TABLE 6A
Adenosine Deaminase Variants. Mutations are
indicated with reference to TadA*8.20.

| | location in structure | | | | | | | | | | |
|---|---|---|---|---|---|---|---|---|---|---|---|
| | N/A | S h1 | S h1 | S h1 | NAS | NAS | NAS | NAS | | S | |
| | Amino Acid No. (*START Met is AA#1) | | | | | | | | | | |
| | 2 | 8 | 13 | 17 | 27 | 47 | 48 | 49 | 67 | 76 | 77 |
| TadA*8.20 | S | H | R | T | E | R | A | I | G | Y | D |
| TadA*8.19 | | | | | | | | | | I | |
| 1.1 | | | | | H | | | | | I | |
| 1.2 | | | | | H | | | K | | I | |
| 1.3 | | | | | S | | | K | | I | |
| 1.4 | | | | | S | | | K | | I | |
| 1.5 | | | | | K | | | | | | |
| 1.6 | | | | | K | | | | | | |
| 1.7 | | | | | H | | | | | I | |
| 1.8 | | | | | S | | | K | W | | |
| 1.9 | | | | | | | | T | W | | |
| 1.10 | | | | | C | | | | | I | |
| 1.11 | | | G | | Q | | | | | | |
| 1.12 | | | | A | H | | | M | | I | |
| 1.13 | | | | | | | | Q | | I | |
| 1.14 | H | | | | | | | K | | I | |
| 1.15 | | | | | | S | | | | | |
| 1.16 | | Q | | | | | | Q | | I | |
| 1.17 | | | | A | | | G | | | | |
| 1.18 | | | | | G | | | | | | |
| 1.19 | | | | | G | | | N | | | |
| 1.20 | | | | | G | | | | | | G |

“S” indicates “Surface,” and “NAS” indicates “Near Active Site.”

TABLE 6A
Adenosine Deaminase Variants. Mutations are indicated with reference to TadA*8.20.

| | location in structure | | | | | | | | | | | |
|---|---|---|---|---|---|---|---|---|---|---|---|---|
| | I | NAS | | NAS | S | | S | S | S | | S | |
| | Amino Acid No. (*START Met is AA#1) | | | | | | | | | | | |
| | 82 | 84 | 96 | 107 | 112 | 115 | 118 | 119 | 127 | 142 | 162 | 165 |
| TadA*8.20 | S | F | H | R | G | G | M | D | N | A | A | S |
| TadA*8.19 | | | | | | | | | | | | |
| 1.1 | | M | | | | | | | | | | |
| 1.2 | | | | | | | | | | | | |
| 1.3 | | | | | | | | | | | | |
| 1.4 | | | | | | | | | | | N | |
| 1.5 | | | | | | | | | | | | |
| 1.6 | | | | | | | | N | | | | |
| 1.7 | | | | | | | | | | | | |
| 1.8 | | | | | | | | | | | | |
| 1.9 | | | N | | | | | | | | | |
| 1.10 | | | | | | | | N | | | | |
| 1.11 | | | | | | | | | K | | | |
| 1.12 | | | | | | | L | | | | | |
| 1.13 | | | | | | M | | | | | | |
| 1.14 | | | | | H | | | | | | | |
| 1.15 | | | | C | | | | | | | | |
| 1.16 | | | | | | | | | | | | |
| 1.17 | T | | | | | | | | | E | | |
| 1.18 | | | | | | | | | | | | |
| 1.19 | | | | | | | | | | | | |
| 1.20 | | | | | | | | | | | | P |

“I” indicates “Internal,” “S” indicates “Surface,” and “NAS” indicates “Near Active Site.”

TABLE 6B
Adenosine deaminase variants. Mutations are
indicated with reference to TadA*8.20.

| | Position No. | | | | | | | | | |
|---|---|---|---|---|---|---|---|---|---|---|
| | 27 | 29 | 30 | 49 | 82 | 84 | 107 | 112 | 115 | 142 |
| TadA*8.20 | E | P | V | I | S | F | R | G | G | A |
| Alterations | G/S/H | G/A/K | I/L/F | K | T | L/A | C | H | M | E |
| Evaluated | | | | | | | | | | |
| S1.1 | S | | | K | T | | | | | |
| S1.2 | S | | | K | T | | C | | | |
| S1.3 | S | | | K | T | | | H | | |
| S1.4 | S | | | K | T | | | | M | |
| S1.5 | S | | | K | T | | | | | E |
| S1.6 | S | | | K | T | | C | H | | |
| S1.7 | S | | | K | T | | C | | M | |
| S1.8 | S | | | K | T | | C | | | E |
| TadA*8.20 | E | P | V | I | S | F | R | G | G | A |
| Alterations | G/S/H | G/A/K | I/L/F | K | T | L/A | C | H | M | E |
| Evaluated | | | | | | | | | | |
| S1.9 | S | | | K | T | | | H | | E |
| S1.10 | S | | | K | T | | | | M | E |
| S1.11 | S | | | K | T | | C | H | M | E |
| S1.12 | S | | I | K | T | | | | | |
| S1.13 | S | | I | K | T | | C | | | |
| S1.14 | S | | I | K | T | | | H | | |
| S1.15 | S | | I | K | T | | | | M | |
| S1.16 | S | | I | K | T | | | | | E |
| S1.17 | S | | I | K | T | | C | H | | |
| S1.18 | S | | I | K | T | | C | | M | |
| S1.19 | S | | I | K | T | | C | | | E |
| S1.20 | S | | I | K | T | | | H | | E |
| S1.21 | S | | I | K | T | | | | M | E |
| S1.22 | S | | I | K | T | | C | H | M | E |
| S1.23 | S | | L | K | T | | | | | |
| S1.24 | S | | L | K | T | | C | | | |
| S1.25 | S | | L | K | T | | | H | | |
| S1.26 | S | | L | K | T | | | | M | |
| S1.27 | S | | L | K | T | | | | | E |
| S1.28 | S | | L | K | T | | C | H | | |
| S1.29 | S | | L | K | T | | C | | M | |
| S1.30 | S | | L | K | T | | C | | | E |
| S1.31 | S | | L | K | T | | | H | | E |
| S1.32 | S | | L | K | T | | | | M | E |
| S1.33 | S | | L | K | T | | C | H | M | E |
| S1.34 | S | | F | K | T | A | | | | |
| S1.35 | S | | F | K | T | A | C | | | |
| S1.36 | S | | F | K | T | A | | H | | |
| S1.37 | S | | F | K | T | A | | | M | |
| S1.38 | S | | F | K | T | A | | | | E |
| S1.39 | S | | F | K | T | A | C | H | | |
| S1.40 | S | | F | K | T | A | C | | M | |
| S1.41 | S | | F | K | T | A | C | | | E |
| S1.42 | S | | F | K | T | A | | H | | E |
| S1.43 | S | | F | K | T | A | | | M | E |
| S1.44 | S | | F | K | T | A | C | H | M | E |
| S1.45 | S | | | K | T | L | | | | |
| S1.46 | S | | | K | T | L | C | | | |
| S1.47 | S | | | K | T | L | | H | | |
| S1.48 | S | | | K | T | L | | | M | |
| S1.49 | S | | | K | T | L | | | | E |
| S1.50 | S | | | K | T | L | C | H | | |
| S1.51 | S | | | K | T | L | C | | M | |
| TadA*8.20 | E | P | V | I | S | F | R | G | G | A |
| Alterations | G/S/H | G/A/K | I/L/F | K | T | L/A | C | H | M | E |
| Evaluated | | | | | | | | | | |
| S1.52 | S | | | K | T | L | C | | | E |
| S1.53 | S | | | K | T | L | | H | | E |
| S1.54 | S | | | K | T | L | | | M | E |
| S1.55 | S | | | K | T | L | C | H | M | E |
| S1.56 | S | | I | K | T | L | | | | |
| S1.57 | S | | I | K | T | L | C | | | |
| S1.58 | S | | I | K | T | L | | H | | |
| S1.59 | S | | I | K | T | L | | | M | |
| S1.60 | S | | I | K | T | L | | | | E |
| S1.61 | S | | I | K | T | L | C | H | | |
| S1.62 | S | | I | K | T | L | C | | M | |
| S1.63 | S | | I | K | T | L | C | | | E |
| S1.64 | S | | I | K | T | L | | H | | E |
| S1.65 | S | | I | K | T | L | | | M | E |
| S1.66 | S | | I | K | T | L | C | H | M | E |
| S1.67 | S | G | | K | T | | | | | |
| S1.68 | S | G | | K | T | | C | | | |
| S1.69 | S | G | | K | T | | | H | | |
| S1.70 | S | G | | K | T | | | | M | |
| S1.71 | S | G | | K | T | | | | | E |
| S1.72 | S | G | | K | T | | C | H | | |
| S1.73 | S | G | | K | T | | C | | M | |
| S1.74 | S | G | | K | T | | C | | | E |
| S1.75 | S | G | | K | T | | | H | | E |
| S1.76 | S | G | | K | T | | | | M | E |
| S1.77 | S | G | | K | T | | C | H | M | E |
| S1.78 | | G | | K | T | | | | | |
| S1.79 | | G | | K | T | | C | | | |
| S1.80 | | G | | K | T | | | H | | |
| S1.81 | | G | | K | T | | | | M | |
| S1.82 | | G | | K | T | | | | | E |
| S1.83 | | G | | K | T | | C | H | | |
| S1.84 | | G | | K | T | | C | | M | |
| S1.85 | | G | | K | T | | C | | | E |
| S1.86 | | G | | K | T | | | H | | E |
| S1.87 | | G | | K | T | | | | M | E |
| S1.88 | | G | | K | T | | C | H | M | E |
| S1.89 | | K | | K | T | | | | | |
| S1.90 | | K | | K | T | | C | | | |
| S1.91 | | K | | K | T | | | H | | |
| S1.92 | | K | | K | T | | | | M | |
| S1.93 | | K | | K | T | | | | | E |
| S1.94 | | K | | K | T | | C | H | | |
| TadA*8.20 | E | P | V | I | S | F | R | G | G | A |
| Alterations | G/S/H | G/A/K | I/L/F | K | T | L/A | C | H | M | E |
| Evaluated | | | | | | | | | | |
| S1.95 | | K | | K | T | | C | | M | |
| S1.96 | | K | | K | T | | C | | | E |
| S1.97 | | K | | K | T | | | H | | E |
| S1.98 | | K | | K | T | | | | M | E |
| S1.99 | | K | | K | T | | C | H | M | E |
| S1.100 | | K | I | K | T | | | | | |
| S1.101 | | K | I | K | T | | C | | | |
| S1.102 | | K | I | K | T | | | H | | |
| S1.103 | | K | I | K | T | | | | M | |
| S1.104 | | K | I | K | T | | | | | E |
| S1.105 | | K | I | K | T | | C | H | | |
| S1.106 | | K | I | K | T | | C | | M | |
| S1.107 | | K | I | K | T | | C | | | E |
| S1.108 | | K | I | K | T | | | H | | E |
| S1.109 | | K | I | K | T | | | | M | E |
| S1.110 | | K | I | K | T | | C | H | M | E |
| S1.111 | | K | | K | T | L | | | | |
| S1.112 | | K | | K | T | L | C | | | |
| S1.113 | | K | | K | T | L | | H | | |
| S1.114 | | K | | K | T | L | | | M | |
| S1.115 | | K | | K | T | L | | | | E |
| S1.116 | | K | | K | T | L | C | H | | |
| S1.117 | | K | | K | T | L | C | | M | |
| S1.118 | | K | | K | T | L | C | | | E |
| S1.119 | | K | | K | T | L | | H | | E |
| S1.120 | | K | | K | T | L | | | M | E |
| S1.121 | | K | | K | T | L | C | H | M | E |
| S1.122 | | K | I | K | T | L | | | | |
| S1.123 | | K | I | K | T | L | C | | | |
| S1.124 | | K | I | K | T | L | | H | | |
| S1.125 | | K | I | K | T | L | | | M | |
| S1.126 | | K | I | K | T | L | | | | E |
| S1.127 | | K | I | K | T | L | C | H | | |
| S1.128 | | K | I | K | T | L | C | | M | |
| S1.129 | | K | I | K | T | L | C | | | E |
| S1.130 | | K | I | K | T | L | | H | | E |
| S1.131 | | K | I | K | T | L | | | M | E |
| S1.132 | | K | I | K | T | L | C | H | M | E |
| S1.133 | G | | | K | T | | | | | |
| S1.134 | G | | | K | T | | C | | | |
| S1.135 | G | | | K | T | | | H | | |
| S1.136 | G | | | K | T | | | | M | |
| S1.137 | G | | | K | T | | | | | E |
| TadA*8.20 | E | P | V | I | S | F | R | G | G | A |
| Alterations | G/S/H | G/A/K | I/L/F | K | T | L/A | C | H | M | E |
| Evaluated | | | | | | | | | | |
| S1.138 | G | | | K | T | | C | H | | |
| S1.139 | G | | | K | T | | C | | M | |
| S1.140 | G | | | K | T | | C | | | E |
| S1.141 | G | | | K | T | | | H | | E |
| S1.142 | G | | | K | T | | | | M | E |
| S1.143 | G | | | K | T | | C | H | M | E |
| S1.144 | H | | | K | T | | | | | |
| S1.145 | H | | | K | T | | C | | | |
| S1.146 | H | | | K | T | | | H | | |
| S1.147 | H | | | K | T | | | | M | |
| S1.148 | H | | | K | T | | | | | E |
| S1.149 | H | | | K | T | | C | H | | |
| S1.150 | H | | | K | T | | C | | M | |
| S1.151 | H | | | K | T | | C | | | E |
| S1.152 | H | | | K | T | | | H | | E |
| S1.153 | H | | | K | T | | | | M | E |
| S1.154 | H | | | K | T | | C | H | M | E |
| S1.155 | S | | | | T | | | | | |
| S1.156 | S | | | | T | | C | | | |
| S1.157 | S | | | | T | | | H | | |
| S1.158 | S | | | | T | | | | M | |
| S1.159 | S | | | | T | | | | | E |
| S1.160 | S | | | | T | | C | H | | |
| S1.161 | S | | | | T | | C | | M | |
| S1.162 | S | | | | T | | C | | | E |
| S1.163 | S | | | | T | | | H | | E |
| S1.164 | S | | | | T | | | | M | E |
| S1.165 | S | | | | T | | C | H | M | E |
| S1.166 | | A | | | T | | | | | |
| S1.167 | | A | | | T | | C | | | |
| S1.168 | | A | | | T | | | H | | |
| S1.169 | | A | | | T | | | | M | |
| S1.170 | | A | | | T | | | | | E |
| S1.171 | | A | | | T | | C | H | | |
| S1.172 | | A | | | T | | C | | M | |
| S1.173 | | A | | | T | | C | | | E |
| S1.174 | | A | | | T | | | H | | E |
| S1.175 | | A | | | T | | | | M | E |
| S1.176 | | A | | | T | | C | H | M | E |
| S1.177 | S | | I | | T | | | | | |
| S1.178 | S | | I | | T | | C | | | |
| S1.179 | S | | I | | T | | | H | | |
| S1.180 | S | | I | | T | | | | M | |
| TadA*8.20 | E | P | V | I | S | F | R | G | G | A |
| Alterations | G/S/H | G/A/K | I/L/F | K | T | L/A | C | H | M | E |
| Evaluated | | | | | | | | | | |
| S1.181 | S | | I | | T | | | | | E |
| S1.182 | S | | I | | T | | C | H | | |
| S1.183 | S | | I | | T | | C | | M | |
| S1.184 | S | | I | | T | | C | | | E |
| S1.185 | S | | I | | T | | | H | | E |
| S1.186 | S | | I | | T | | | | M | E |
| S1.187 | S | | I | | T | | C | H | M | E |
| S1.188 | | A | I | | T | L | | | | |
| S1.189 | | A | I | | T | L | C | | | |
| S1.190 | | A | I | | T | L | | H | | |
| S1.191 | | A | I | | T | L | | | M | |
| S1.192 | | A | I | | T | L | | | | E |
| S1.193 | | A | I | | T | L | C | H | | |
| S1.194 | | A | I | | T | L | C | | M | |
| S1.195 | | A | I | | T | L | C | | | E |
| S1.196 | | A | I | | T | L | | H | | E |
| S1.197 | | A | I | | T | L | | | M | E |
| S1.198 | | A | I | | T | L | C | H | M | E |
| S1.199 | S | A | L | K | T | L | C | H | M | E |

TABLE 6C
Adenosine deaminase variants. Mutations are indicated with reference to variant 1.2 (Table 6A).

| | Alternative Variant | Residue identity (START Met is amino acid #1) | | | | | | | | |
|---|---|---|---|---|---|---|---|---|---|---|
| Variant Name | Names | 4 | 6 | 17 | 23 | 76 | 77 | 100 | 111 | 114 |
| Reference | 1.2 (see Table 6A) | V | F | T | R | I | D | G | T | A |
| TadAC2.1 | pDKL-135; 2.1 | K | | | | | | | | C |
| TadAC2.2 | pDKL-136; 2.2 | K | | | | | G | | | |
| TadAC2.3 | pDKL-137; 2.3 | | Y | | | | | A | | |
| TadAC2.4 | pDKL-138; 2.4 | T | | | | R | | | | |
| TadAC2.5 | pDKL-139; 2.5 | | Y | | | W | | | | |
| TadAC2.6 | pDKL-140; 2.6 | | Y | | | | | | | |
| TadAC2.7 | pDKL-141; 2.7 | | Y | | | | | | | C |
| TadAC2.8 | pDKL-142; 2.8 | | Y | | | | | | | |
| TadAC2.9 | pDKL-143; 2.9 | K | | | | W | | | | |
| TadAC2.10 | pDKL-144; 2.10 | | G | | | R | | K | | |
| TadAC2.11 | pDKL-145; 2.11 | | H | | | | | | | |
| TadAC2.12 | pDKL-146; 2.12 | | | | | | | | | C |
| TadAC2.13 | pDKL-147; 2.13 | | Y | | | H | | | | |
| Reference | 1.2 (see Table 6A) | V | F | T | R | I | D | G | T | A |
| TadAC2.14 | pDKL-148; 2.14 | | | | | | | | | |
| TadAC2.15 | pDKL-149; 2.15 | | | | Q | R | | | | |
| TadAC2.16 | pDKL-150; 2.16 | | | | | H | | | | |
| TadAC2.17 | pDKL-151; 2.17 | | Y | | | | | | H | |
| TadAC2.18 | pDKL-152; 2.18 | | | | | W | | | | |
| TadAC2.19 | pDKL-153; 2.19 | | | | | | | | H | |
| TadAC2.20 | pDKL-154; 2.20 | | | | | | | | | |
| TadAC2.21 | pDKL-155; 2.21 | | Y | | | R | | | | |
| TadAC2.22 | pDKL-156; 2.22 | | | W | | H | | | | |
| TadAC2.23 | pDKL-157; 2.23 | S | | | | Y | | | | |
| TadAC2.24 | pDKL-158; 2.24 | | | | | | | | | |

| | Alternative Variant | Residue identity (START Met is amino acid #1) | | | | | | | | |
|---|---|---|---|---|---|---|---|---|---|---|
| Variant Name | Names | 119 | 122 | 127 | 143 | 147 | 158 | 159 | 162 | 166 |
| Reference | 1.2 (see Table 6A) | D | H | N | A | R | A | Q | A | T |
| TadAC2.1 | pDKL-135; 2.1 | | | | | | | | | |
| TadAC2.2 | pDKL-136; 2.2 | | | | | | | | | |
| TadAC2.3 | pDKL-137; 2.3 | | R | | | | | | | |
| TadAC2.4 | pDKL-138; 2.4 | | G | | | | | | | |
| TadAC2.5 | pDKL-139; 2.5 | | | | | | | | | |
| TadAC2.6 | pDKL-140; 2.6 | N | | | | | | | | |
| TadAC2.7 | pDKL-141; 2.7 | | | | | | | | | |
| TadAC2.8 | pDKL-142; 2.8 | | | | | | | | | |
| TadAC2.9 | pDKL-143; 2.9 | | T | | | | | | | |
| TadAC2.10 | pDKL-144; 2.10 | | | | | | | | | |
| TadAC2.11 | pDKL-145; 2.11 | | N | | | | | | | |
| TadAC2.12 | pDKL-146; 2.12 | | | | | | | | | |
| TadAC2.13 | pDKL-147; 2.13 | | R | | | | | | | I |
| TadAC2.14 | pDKL-148; 2.14 | | | P | | | | | | |
| TadAC2.15 | pDKL-149; 2.15 | | | | | | | | | |
| TadAC2.16 | pDKL-150; 2.16 | | R | | | | V | | | |
| TadAC2.17 | pDKL-151; 2.17 | | | | | | | | | |
| TadAC2.18 | pDKL-152; 2.18 | | | | | | | | | |
| TadAC2.19 | pDKL-153; 2.19 | | G | | | | | | C | |
| Reference | 1.2 (see Table 6A) | D | H | N | A | R | A | Q | A | T |
| TadAC2.20 | pDKL-154; 2.20 | | | | E | | | | | |
| TadAC2.21 | pDKL-155; 2.21 | | | | | | | | | |
| TadAC2.22 | pDKL-156; 2.22 | | G | | | | V | | | |
| TadAC2.23 | pDKL-157; 2.23 | | | | E | | | S | | |
| TadAC2.24 | pDKL-158; 2.24 | | | I | | | | | Q | |

TABLE 6D
Adenosine deaminase variants. Mutations are indicated with reference to TadA*8.20.

| | AA Positions | | | | | | | | | | | | | | |
|---|---|---|---|---|---|---|---|---|---|---|---|---|---|---|---|
| | 6 | 27 | 49 | 76 | 77 | 82 | 107 | 112 | 114 | 115 | 119 | 122 | 127 | 142 | 143 |
| TadA*8.20 | F | E | I | Y | D | S | R | G | A | G | D | H | N | A | A |
| S1.154 | F | H | K | Y | D | T | C | H | | M | | | | E | |
| Alterations | Y | | | W | G | | | | C | | N | G | P | | E |
| from Table | | | | | | | | | | | | | | | |
| 6C | | | | | | | | | | | | | | | |
| S2.1 | Y | H | K | W | | T | C | H | | M | | | | E | |
| S2.2 | Y | H | K | | G | T | C | H | | M | | | | E | |
| S2.3 | Y | H | K | | | T | C | H | C | M | | | | E | |
| S2.4 | Y | H | K | | | T | C | H | | M | N | | | E | |
| S2.5 | Y | H | K | | | T | C | H | | M | | G | | E | |
| S2.6 | Y | H | K | | | T | C | H | | M | | | P | E | |
| S2.7 | Y | H | K | | | T | C | H | | M | | | | E | E |
| S2.8 | Y | H | K | | | T | C | H | | M | | | | A | E |
| S2.9 | Y | H | K | W | G | T | C | H | | M | | | | E | |
| S2.10 | Y | H | K | W | | T | C | H | C | M | | | | E | |
| S2.11 | Y | H | K | W | | T | C | H | | M | N | | | E | |
| S2.12 | Y | H | K | W | | T | C | H | | M | | G | | E | |
| S2.13 | Y | H | K | W | | T | C | H | | M | | | P | E | |
| S2.14 | Y | H | K | W | | T | C | H | | M | | | | E | E |
| S2.15 | Y | H | K | W | | T | C | H | | M | | | | A | E |
| S2.16 | Y | H | K | | G | T | C | H | C | M | | | | E | |
| S2.17 | Y | H | K | | G | T | C | H | | M | N | | | E | |
| S2.18 | Y | H | K | | G | T | C | H | | M | | G | | E | |
| S2.19 | Y | H | K | | G | T | C | H | | M | | | P | E | |
| S2.20 | Y | H | K | | G | T | C | H | | M | | | | E | E |
| TadA*8.20 | F | E | I | Y | D | S | R | G | A | G | D | H | N | A | A |
| S2.21 | Y | H | K | | G | T | C | H | | M | | | | A | E |
| S2.22 | Y | H | K | | | T | C | H | C | M | N | | | E | |
| S2.23 | Y | H | K | | | T | C | H | C | M | | G | | E | |
| S2.24 | Y | H | K | | | T | C | H | C | M | | | P | E | |
| S2.25 | Y | H | K | | | T | C | H | | M | N | G | | E | |
| S2.26 | Y | H | K | | | T | C | H | | M | N | | P | E | |
| S2.27 | Y | H | K | | | T | C | H | | M | | G | P | E | |
| S2.28 | Y | H | K | W | G | T | C | H | C | M | | | | E | |
| S2.29 | Y | H | K | W | G | T | C | H | | M | N | | | E | |
| S2.30 | Y | H | K | W | G | T | C | H | | M | | G | | E | |
| S2.31 | Y | H | K | W | G | T | C | H | | M | | | P | E | |
| S2.32 | Y | H | K | W | G | T | C | H | | M | | | | E | E |
| S2.33 | Y | H | K | W | | T | C | H | | M | | | | A | E |
| S2.34 | Y | H | K | W | | T | C | H | C | M | N | | | E | |
| S2.35 | Y | H | K | W | | T | C | H | C | M | | G | | E | |
| S2.36 | Y | H | K | W | | T | C | H | C | M | | | P | E | |
| S2.37 | Y | H | K | W | | T | C | H | C | M | | | | E | E |
| S2.38 | Y | H | K | W | | T | C | H | C | M | | | | A | E |
| S2.39 | Y | H | K | W | | T | C | H | | M | N | G | | E | |
| S2.40 | Y | H | K | W | | T | C | H | | M | N | | P | E | |
| S2.41 | Y | H | K | W | | T | C | H | | M | | G | P | E | |
| S2.42 | Y | H | K | W | | T | C | H | C | M | N | G | | E | |
| S2.43 | Y | H | K | W | | T | C | H | C | M | N | | P | E | |
| S2.44 | Y | H | K | W | | T | C | H | C | M | | G | P | E | |
| S2.45 | Y | H | K | W | G | T | C | H | C | M | N | | | E | |
| S2.46 | Y | H | K | W | G | T | C | H | C | M | | G | | E | |
| S2.47 | Y | H | K | W | G | T | C | H | C | M | | | P | E | |
| S2.48 | Y | H | K | W | G | T | C | H | C | M | | | | E | E |
| S2.49 | Y | H | K | W | G | T | C | H | C | M | | | | A | E |
| S2.50 | Y | H | K | W | G | T | C | H | C | M | N | G | | E | |
| S2.51 | Y | H | K | W | G | T | C | H | C | M | N | | P | E | |
| S2.52 | Y | H | K | W | G | T | C | H | C | M | | G | P | E | |
| S2.53 | Y | H | K | W | | T | C | H | C | M | N | G | P | E | E |
| S2.54 | Y | H | K | W | | T | C | H | C | M | N | G | P | A | E |
| S2.55 | Y | H | K | W | G | T | C | H | C | M | N | G | P | E | E |
| S2.56 | Y | H | K | W | G | T | C | H | C | M | N | G | P | A | E |

TABLE 6E
Hybrid constructs. Mutations are indicated with reference to TadA*7.10.

| | TadA amino acid subsitutions | | | | | | | | | | | |
|---|---|---|---|---|---|---|---|---|---|---|---|---|
| | 76 | 82 | 109 | 111 | 119 | 122 | 123 | 147 | 149 | 154 | 166 | 167 |
| TadA*7.10 | I | V | A | T | D | H | Y | Y | F | Q | T | D |
| TadA*8e | | | S | R | N | N | | D | Y | | I | N |
| TadA*8.20 | Y | S | | | | | H | R | | R | | |
| TadA*8.17 | | S | | | | | | | | R | | |
| pNMG-B878 | Y | S | | | | | H | D | | R | | |
| pNMG-B879 | Y | S | | | | | H | R | Y | R | | |
| pNMG-B880 | Y | S | | | | | H | R | | R | I | |
| pNMG-B881 | Y | S | | | | | H | R | | R | | N |
| pNMG-B882 | Y | S | | | | | H | D | Y | R | I | N |
| pNMG-B883 | Y | S | | R | N | | H | R | | R | | |
| pNMG-B884 | Y | S | S | R | N | N | H | R | | R | | |
| pNMG-B885 | Y | S | S | | | | H | R | | R | | |
| pNMG-B886 | Y | S | | R | | | H | R | | R | | |
| pNMG-B887 | Y | S | | | N | | H | R | | R | | |
| pNMG-B888 | Y | S | | | | N | H | R | | R | | |
| pNMG-B889 | Y | S | S | R | | | H | R | | R | | |
| pNMG-B890 | Y | S | | | N | N | H | R | | R | | |
| pNMG-B891 | Y | S | S | R | N | N | H | D | Y | R | I | N |

TABLE 6F
Base editor variants. Mutations are indicated with reference to TadA*8.19/8.20.

| | AA positions: | | | | | | | | | | | | |
|---|---|---|---|---|---|---|---|---|---|---|---|---|---|
| | 17 | 27 | 48 | 49 | 76 | 82 | 84 | 118 | 142 | 147 | 149 | 166 | 167 |
| ABE8.19m/8.20m | T | E | A | I | Y/I | S | F | M | A | Y | F | T | D |
| 1.1 + 8e(B879) | | H | | | I | | M | | | | Y | | |
| 1.2 + 8e(B879) | | H | | K | I | | | | | | Y | | |
| 1.12 + 8e(B879) | A | H | | M | I | | | L | | | Y | | |
| 1.17 + 8e(B879) | A | | G | | | T | | | E | | Y | | |
| 1.18 + 8e(B879) | | G | | | | | | | | | Y | | |
| 1.19 + 8e(B879) | | G | | N | | | | | | | Y | | |
| 1.1 + 8e(B882) | | H | | | I | | M | | | D | Y | I | N |
| 1.2 + 8e(B882) | | H | | K | I | | | | | D | Y | I | N |
| 1.12 + 8e(B882) | A | H | | M | I | | | L | | D | Y | I | N |
| 1.17 + 8e(B882) | A | | G | | | T | | | E | D | Y | I | N |
| 1.18 + 8e(B882) | | G | | | | | | | | D | Y | I | N |
| 1.19 + 8e(B882) | | G | | N | | | | | | D | Y | I | N |

### Guide Polynucleotides

[0657] A polynucleotide programmable nucleotide binding domain, when in conjunction with a bound guide polynucleotide (e.g., gRNA), can specifically bind to a target polynucleotide sequence (i.e., via complementary base pairing between bases of the bound guide nucleic acid and bases of the target polynucleotide sequence) and thereby localize the base editor to the target nucleic acid sequence desired to be edited. In some embodiments, the target polynucleotide sequence comprises single-stranded DNA or double-stranded DNA. In some embodiments, the target polynucleotide sequence comprises RNA. In some embodiments, the target polynucleotide sequence comprises a DNA-RNA hybrid.

[0658] In an embodiment, a guide polynucleotide described herein can be RNA or DNA. In one embodiment, the guide polynucleotide is a gRNA.

[0659] In some embodiments, the guide polynucleotide is at least one single guide RNA (“sgRNA” or “gRNA”). In some embodiments, a guide polynucleotide comprises two or more individual polynucleotides, which can interact with one another via for example complementary base pairing (e.g., a dual guide polynucleotide, dual gRNA). For example, a guide polynucleotide can comprise a CRISPR RNA (crRNA) and a trans-activating CRISPR RNA (tracrRNA) or can comprise one or more trans-activating CRISPR RNA (tracrRNA).

[0660] A guide polynucleotide may include natural or non-natural (or unnatural) nucleotides (e.g., peptide nucleic acid or nucleotide analogs). In some cases, the targeting region of a guide nucleic acid sequence (e.g., a spacer) can be at least 15, 16, 17, 18, 19, 20, 21, 22, 23, 24, 25, 26, 27, 28, 29, or 30 nucleotides in length.

[0661] In some embodiments, the methods described herein can utilize an engineered Cas protein. A guide RNA (gRNA) is a short synthetic RNA composed of a scaffold sequence necessary for Cas-binding and a user-defined ˜20 nucleotide spacer that defines the genomic target to be modified. Exemplary gRNA scaffold sequences are provided in the sequence listing as SEQ ID NOs: 317-327 and 1010. Thus, a skilled artisan can change the genomic target of the Cas protein specificity is partially determined by how specific the gRNA targeting sequence is for the genomic target compared to the rest of the genome. In embodiments, the spacer is about 10, 11, 12, 13, 14, 15, 16, 17, 18, 19, 20, 22, 23, 24, 25, or more nucleotides in length. The spacer of a gRNA can be or can be about 19, 20, or 21 nucleotides in length.

[0662] A gRNA or a guide polynucleotide can target any exon or intron of a gene target. In some embodiments, a composition comprises multiple gRNAs that all target the same exon or multiple gRNAs that target different exons. An exon and/or an intron of a gene can be targeted. A gRNA or a guide polynucleotide can target a nucleic acid sequence of about 20 nucleotides or less than about 20 nucleotides (e.g., at least about 5, 10, 15, 16, 17, 18, 19, 20, 21, 22, 23, 24, 25, 30 nucleotides), or anywhere between about 1-100 nucleotides (e.g., 5, 10, 15, 16, 17, 18, 19, 20, 21, 22, 23, 24, 25, 30, 40, 50, 60, 70, 80, 90, 100). A target nucleic acid sequence can be or can be about 20 bases immediately 5′ of the first nucleotide of the PAM. A gRNA can target a nucleic acid sequence. A target nucleic acid can be at least or at least about 1-10, 1-20, 1-30, 1-40, 1-50, 1-60, 1-70, 1-80, 1-90, or 1-100 nucleotides.

[0663] The guide polynucleotides can comprise standard ribonucleotides, modified ribonucleotides (e.g., pseudouridine), ribonucleotide isomers, and/or ribonucleotide analogs.

[0664] In some embodiments, a base editor system may comprise multiple guide polynucleotides, e.g., gRNAs. For example, the gRNAs may target to one or more target loci (e.g., at least 1 gRNA, at least 2 gRNA, at least 5 gRNA, at least 10 gRNA, at least 20 gRNA, at least 30 g RNA, at least 50 gRNA) comprised in a base editor system. The multiple gRNA sequences can be tandemly arranged and may be separated by a direct repeat.

### Modified Polynucleotides

[0665] To enhance expression, stability, and/or genomic/base editing efficiency, and/or reduce possible toxicity, the base editor-coding sequence (e.g., mRNA) and/or the guide polynucleotide (e.g., gRNA) can be modified to include one or more modified nucleotides and/or chemical modifications, e.g. using pseudo-uridine, 5-Methyl-cytosine, 2′-O-methyl-3′-phosphonoacetate, 2′-O-methyl thioPACE (MSP), 2′-O-methyl-PACE (MP), 2′-fluoro RNA (2′-F-RNA), =constrained ethyl (S-cEt), 2′-O-methyl (‘M’), 2′-O-methyl-3′-phosphorothioate (‘MS’), 2′-O-methyl-3′-thiophosphonoacetate (‘MSP’), 5-methoxyuridine, phosphorothioate, and N1-Methylpseudouridine. Chemically protected gRNAs can enhance stability and editing efficiency in vivo and ex vivo. Methods for using chemically modified mRNAs and guide RNAs are known in the art and described, for example, by Jiang et al., Chemical modifications of adenine base editor mRNA and guide RNA expand its application scope. Nat Commun 11, 1979 (2020). doi.org/10.1038/s41467-020-15892-8, Callum et al., N1-Methylpseudouridine substitution enhances the performance of synthetic mRNA switches in cells, Nucleic Acids Research, Volume 48, Issue 6, 6 Apr. 2020, Page e35, and Andries et al., Journal of Controlled Release, Volume 217, 10 Nov. 2015, Pages 337-344, each of which is incorporated herein by reference in its entirety.

[0666] In some embodiments, the guide polynucleotide comprises one or more modified nucleotides at the 5′ end and/or the 3′ end of the guide. In some embodiments, the guide polynucleotide comprises two, three, four or more modified nucleosides at the 5′ end and/or the 3′ end of the guide. In some embodiments, the guide polynucleotide comprises two, three, four or more modified nucleosides at the 5′ end and/or the 3′ end of the guide.

[0667] In some embodiments, the guide comprises at least about 50%-75% modified nucleotides. In some embodiments, the guide comprises at least about 85% or more modified nucleotides. In some embodiments, at least about 1-5 nucleotides at the 5′ end of the gRNA are modified and at least about 1-5 nucleotides at the 3′ end of the gRNA are modified. In some embodiments, at least about 3-5 contiguous nucleotides at each of the 5′ and 3′ termini of the gRNA are modified. In some embodiments, at least about 20% of the nucleotides present in a direct repeat or anti-direct repeat are modified. In some embodiments, at least about 50% of the nucleotides present in a direct repeat or anti-direct repeat are modified. In some embodiments, at least about 50-75% of the nucleotides present in a direct repeat or anti-direct repeat are modified. In some embodiments, at least about 100 of the nucleotides present in a direct repeat or anti-direct repeat are modified. In some embodiments, at least about 20% or more of the nucleotides present in a hairpin present in the gRNA scaffold are modified. In some embodiments, at least about 50% or more of the nucleotides present in a hairpin present in the gRNA scaffold are modified. In some embodiments, the guide comprises a variable length spacer. In some embodiments, the guide comprises a 20-40 nucleotide spacer. In some embodiments, the guide comprises a spacer comprising at least about 20-25 nucleotides or at least about 30-35 nucleotides. In some embodiments, the spacer comprises modified nucleotides. In some embodiments, the guide comprises two or more of the following:
[0668] at least about 1-5 nucleotides at the 5′ end of the gRNA are modified and at least about 1-5 nucleotides at the 3′ end of the gRNA are modified;
[0669] at least about 20% of the nucleotides present in a direct repeat or anti-direct repeat are modified;
[0670] at least about 50-75% of the nucleotides present in a direct repeat or anti-direct repeat are modified;
[0671] at least about 20% or more of the nucleotides present in a hairpin present in the gRNA scaffold are modified;
[0672] a variable length spacer; and
[0673] a spacer comprising modified nucleotides.

[0674] In embodiments, the gRNA contains numerous modified nucleotides and/or chemical modifications (“heavy mods”). Such heavy mods can increase base editing ˜2 fold in vivo or in vitro. In embodiments, the gRNA comprises 2′-O-methyl or phosphorothioate modifications. In an embodiment, the gRNA comprises 2′-O-methyl and phosphorothioate modifications. In an embodiment, the modifications increase base editing by at least about 2 fold.

[0675] A guide polynucleotide can comprise one or more modifications to provide a nucleic acid with a new or enhanced feature. A guide polynucleotide can comprise a nucleic acid affinity tag. A guide polynucleotide can comprise synthetic nucleotide, synthetic nucleotide analog, nucleotide derivatives, and/or modified nucleotides.

[0676] A gRNA or a guide polynucleotide can also be modified by 5′ adenylate, 5′ guanosine-triphosphate cap, 5′ N7-Methylguanosine-triphosphate cap, 5′ triphosphate cap, 3′ phosphate, 3′ thiophosphate, 5′ phosphate, 5′ thiophosphate, Cis-Syn thymidine dimer, trimers, C12 spacer, C3 spacer, C6 spacer, dSpacer, PC spacer, rSpacer, Spacer 18, Spacer 9, 3′-3′ modifications, 2′-O-methyl thioPACE (MSP), 2′-O-methyl-PACE (MP), and constrained ethyl (S-cEt), 5′-5′ modifications, abasic, acridine, azobenzene, biotin, biotin BB, biotin TEG, cholesteryl TEG, desthiobiotin TEG, DNP TEG, DNP-X, DOTA, dT-Biotin, dual biotin, PC biotin, psoralen C2, psoralen C6, TINA, 3′ DABCYL, black hole quencher 1, black hole quencher 2, DABCYL SE, dT-DABCYL, IRDye QC-1, QSY-21, QSY-35, QSY-7, QSY-9, carboxyl linker, thiol linkers, 2′-deoxyribonucleoside analog purine, 2′-deoxyribonucleoside analog pyrimidine, ribonucleoside analog, 2′-O-methyl ribonucleoside analog, sugar modified analogs, wobble/universal bases, fluorescent dye label, 2′-fluoro RNA, 2′-O-methyl RNA, methylphosphonate, phosphodiester DNA, phosphodiester RNA, phosphothioate DNA, phosphorothioate RNA, UNA, pseudouridine-5′-triphosphate, 5′-methylcytidine-5′-triphosphate, or any combination thereof.

[0677] In some cases, a phosphorothioate enhanced RNA gRNA can inhibit RNase A, RNase T1, calf serum nucleases, or any combinations thereof. These properties can allow the use of PS-RNA gRNAs to be used in applications where exposure to nucleases is of high probability in vivo or in vitro. For example, phosphorothioate (PS) bonds can be introduced between the last 3-nucleotides at the 5′- or 3′-end of a gRNA which can inhibit exonuclease degradation. In some cases, phosphorothioate bonds can be added throughout an entire gRNA to reduce attack by endonucleases.

### Fusion Proteins or Complexes Comprising a Nuclear Localization Sequence (NLS)

[0678] In some embodiments, the fusion proteins or complexes provided herein further comprise one or more (e.g., 2, 3, 4, 5) nuclear targeting sequences, for example a nuclear localization sequence (NLS). In one embodiment, a bipartite NLS is used. In some embodiments, a NLS comprises an amino acid sequence that facilitates the importation of a protein, that comprises an NLS, into the cell nucleus (e.g., by nuclear transport). In some embodiments, the NLS is fused to the N-terminus or the C-terminus of the fusion protein. In some embodiments, the NLS is fused to the C-terminus or N-terminus of an nCas9 domain or a dCas9 domain. In some embodiments, the NLS is fused to the N-terminus or C-terminus of the Cas12 domain. In some embodiments, the NLS is fused to the N-terminus or C-terminus of the cytidine or adenosine deaminase. In some embodiments, the NLS is fused to the fusion protein via one or more linkers. In some embodiments, the NLS is fused to the fusion protein without a linker. In some embodiments, the NLS comprises an amino acid sequence of any one of the NLS sequences provided or referenced herein. Additional nuclear localization sequences are known in the art and would be apparent to the skilled artisan. For example, NLS sequences are described in Plank et al., PCT/EP2000/011690, the contents of which are incorporated herein by reference for their disclosure of exemplary nuclear localization sequences.

[0679] In some embodiments, the NLS is present in a linker or the NLS is flanked by linkers, for example described herein. A bipartite NLS comprises two basic amino acid clusters, which are separated by a relatively short spacer sequence (hence bipartite-2 parts, while monopartite NLSs are not). The NLS of nucleoplasmin, KR[PAATKKAGQA]KKKK (SEQ ID NO: 191), is the prototype of the ubiquitous bipartite signal: two clusters of basic amino acids, separated by a spacer of about 10 amino acids. The sequence of an exemplary bipartite NLS follows: PKKKRKVEGADKRTADGSEFESPKKKRKV (SEQ ID NO: 328).

[0680] In some embodiments, any of the fusion proteins or complexes provided herein comprise an NLS comprising the amino acid sequence EGADKRTADGSEFESPKKKRKV (amino acids 8 to 29 of SEQ ID NO 328). In some embodiments, any of the adenosine base editors provided herein, for example ABE Variant A, ABE Variant B, ABE Variant C, ABE Variant D, ABE Variant E, ABE Variant F, ABE Variant G, ABE Variant H, ABE Variant I, ABE Variant J, ABE Variant K, or ABE Variant D comprise an NLS comprising the amino acid sequence EGADKRTADGSEFESPKKKRKV (amino acids 8 to 29 of SEQ ID NO: 328). In some embodiments, the NLS is at a C-terminal portion of the adenosine base editor. In some embodiments, the NLS is at the C-terminus of the adenosine base editor.

### Additional Domains

[0681] A base editor described herein can include any domain which helps to facilitate the nucleobase editing, modification or altering of a nucleobase of a polynucleotide. In some embodiments, a base editor comprises a polynucleotide programmable nucleotide binding domain (e.g., Cas9), a nucleobase editing domain (e.g., deaminase domain), and one or more additional domains. In some embodiments, the additional domain can facilitate enzymatic or catalytic functions of the base editor, binding functions of the base editor, or be inhibitors of cellular machinery (e.g., enzymes) that could interfere with the desired base editing result. In some embodiments, a base editor comprises a nuclease, a nickase, a recombinase, a deaminase, a methyltransferase, a methylase, an acetylase, an acetyltransferase, a transcriptional activator, or a transcriptional repressor domain.

[0682] In some embodiments, a base editor comprises an uracil glycosylase inhibitor (UGI) domain. In some embodiments, cellular DNA repair response to the presence of U:G heteroduplex DNA can be responsible for a decrease in nucleobase editing efficiency in cells. In such embodiments, uracil DNA glycosylase (UDG) can catalyze removal of U from DNA in cells, which can initiate base excision repair (BER), mostly resulting in reversion of the U:G pair to a C:G pair. In such embodiments, BER can be inhibited in base editors comprising one or more domains that bind the single strand, block the edited base, inhibit UGI, inhibit BER, protect the edited base, and/or promote repairing of the non-edited strand. Thus, this disclosure contemplates a base editor fusion protein or complex comprising a UGI domain and/or a uracil stabilizing protein (USP) domain.

### Base Editor System

[0683] Provided herein are systems, compositions, and methods for editing a nucleobase using a base editor system. In some embodiments, the base editor system comprises (1) a base editor (BE) comprising a polynucleotide programmable nucleotide binding domain and a nucleobase editing domain (e.g., a deaminase domain) for editing the nucleobase; and (2) a guide polynucleotide (e.g., guide RNA) in conjunction with the polynucleotide programmable nucleotide binding domain. In some embodiments, the base editor system is a cytidine base editor (CBE) or an adenosine base editor (ABE). In some embodiments, the polynucleotide programmable nucleotide binding domain is a polynucleotide programmable DNA or RNA binding domain. In some embodiments, the nucleobase editing domain is a deaminase domain. In some embodiments, a deaminase domain can be a cytidine deaminase or an cytosine deaminase. In some embodiments, a deaminase domain can be an adenine deaminase or an adenosine deaminase. In some embodiments, the adenosine base editor can deaminate adenine in DNA. In some embodiments, the base editor is capable of deaminating a cytidine in DNA.

[0684] Use of the base editor system provided herein comprises the steps of: (a) contacting a target nucleotide sequence of a polynucleotide (e.g., double- or single stranded DNA or RNA) of a subject with a base editor system comprising a nucleobase editor (e.g., an adenosine base editor or a cytidine base editor) and a guide polynucleotide (e.g., gRNA), wherein the target nucleotide sequence comprises a targeted nucleobase pair; (b) inducing strand separation of said target region; (c) converting a first nucleobase of said target nucleobase pair in a single strand of the target region to a second nucleobase; and (d) cutting no more than one strand of said target region, where a third nucleobase complementary to the first nucleobase base is replaced by a fourth nucleobase complementary to the second nucleobase. It should be appreciated that in some embodiments, step (b) is omitted. In some embodiments, said targeted nucleobase pair is a plurality of nucleobase pairs in one or more genes. In some embodiments, the base editor system provided herein is capable of multiplex editing of a plurality of nucleobase pairs in one or more genes. In some embodiments, the plurality of nucleobase pairs is located in the same gene. In some embodiments, the plurality of nucleobase pairs is located in one or more genes, wherein at least one gene is located in a different locus.

[0685] The components of a base editor system (e.g., a deaminase domain, a guide RNA, and/or a polynucleotide programmable nucleotide binding domain) may be associated with each other covalently or non-covalently. For example, in some embodiments, the deaminase domain can be targeted to a target nucleotide sequence by a polynucleotide programmable nucleotide binding domain, optionally where the polynucleotide programmable nucleotide binding domain is complexed with a polynucleotide (e.g., a guide RNA). In some embodiments, a polynucleotide programmable nucleotide binding domain can be fused or linked to a deaminase domain. In some embodiments, a polynucleotide programmable nucleotide binding domain can target a deaminase domain to a target nucleotide sequence by non-covalently interacting with or associating with the deaminase domain. For example, in some embodiments, the nucleobase editing component (e.g., the deaminase component) comprises an additional heterologous portion or domain that is capable of interacting with, associating with, or capable of forming a complex with a corresponding heterologous portion, antigen, or domain that is part of a polynucleotide programmable nucleotide binding domain and/or a guide polynucleotide (e.g., a guide RNA) complexed therewith. In some embodiments, the polynucleotide programmable nucleotide binding domain, and/or a guide polynucleotide (e.g., a guide RNA) complexed therewith, comprises an additional heterologous portion or domain that is capable of interacting with, associating with, or capable of forming a complex with a corresponding heterologous portion, antigen, or domain that is part of a nucleobase editing domain (e.g., the deaminase component). In some embodiments, the additional heterologous portion may be capable of binding to, interacting with, associating with, or forming a complex with a polypeptide. In some embodiments, the additional heterologous portion may be capable of binding to, interacting with, associating with, or forming a complex with a polynucleotide. In some embodiments, the additional heterologous portion may be capable of binding to a guide polynucleotide. In some embodiments, the additional heterologous portion may be capable of binding to a polypeptide linker. In some embodiments, the additional heterologous portion is capable of binding to a polynucleotide linker. An additional heterologous portion may be a protein domain. In some embodiments, an additional heterologous portion comprises a polypeptide, such as a 22 amino acid RNA-binding domain of the lambda bacteriophage antiterminator protein N (N22p), a 2G12 IgG homodimer domain, an ABI, an antibody (e.g. an antibody that binds a component of the base editor system or a heterologous portion thereof) or fragment thereof (e.g. heavy chain domain 2 (CH₂) of IgM (MHD2) or IgE (EHD2), an immunoglobulin Fc region, a heavy chain domain 3 (CH3) of IgG or IgA, a heavy chain domain 4 (CH4) of IgM or IgE, an Fab, an Fab2, miniantibodies, and/or ZIP antibodies), a barnase-barstar dimer domain, a Bcl-xL domain, a Calcineurin A (CAN) domain, a Cardiac phospholamban transmembrane pentamer domain, a collagen domain, a Com RNA binding protein domain (e.g. SfMu Com coat protein domain, and SfMu Com binding protein domain), a Cyclophilin-Fas fusion protein (CyP-Fas) domain, a Fab domain, an Fe domain, a fibritin foldon domain, an FK506 binding protein (FKBP) domain, an FKBP binding domain (FRB) domain of mTOR, a foldon domain, a fragment X domain, a GAI domain, a GIDI domain, a Glycophorin A transmembrane domain, a GyrB domain, a Halo tag, an HIV Gp41 trimerisation domain, an HPV45 oncoprotein E7 C-terminal dimer domain, a hydrophobic polypeptide, a K Homology (KH) domain, a Ku protein domain (e.g., a Ku heterodimer), a leucine zipper, a LOV domain, a mitochondrial antiviral-signaling protein CARD filament domain, an MS2 coat protein domain (MCP), a non-natural RNA aptamer ligand that binds a corresponding RNA motif/aptamer, a parathyroid hormone dimerization domain, a PP7 coat protein (PCP) domain, a PSD95-Dlgl-zo-1 (PDZ) domain, a PYL domain, a SNAP tag, a SpyCatcher moiety, a SpyTag moiety, a streptavidin domain, a streptavidin-binding protein domain, a streptavidin binding protein (SBP) domain, a telomerase Sm7 protein domain (e.g. Sm7 homoheptamer or a monomeric Sm-like protein), and/or fragments thereof. In embodiments, an additional heterologous portion comprises a polynucleotide (e.g., an RNA motif), such as an MS2 phage operator stem-loop (e.g., an MS2, an MS2 C-5 mutant, or an MS2 F-5 mutant), a non-natural RNA motif, a PP7 operator stem-loop, an SfMu phate Com stem-loop, a steril alpha motif, a telomerase Ku binding motif, a telomerase Sm7 binding motif, and/or fragments thereof. Non-limiting examples of additional heterologous portions include polypeptides with at least about 85% sequence identity to any one or more of SEQ ID NOs: 380, 382, 384, 386-388, or fragments thereof. Non-limiting examples of additional heterologous portions include polynucleotides with at least about 85% sequence identity to any one or more of SEQ ID NOs: 379, 381, 383, 385, or fragments thereof.

[0686] In some instances, components of the base editing system are associated with one another through the interaction of leucine zipper domains (e.g., SEQ ID NOs: 387 and 388). In some cases, components of the base editing system are associated with one another through polypeptide domains (e.g., FokI domains) that associate to form protein complexes containing about, at least about, or no more than about 1, 2 (i.e., dimerize), 3, 4, 5, 6, 7, 8, 9, 10 polypeptide domain units, optionally the polypeptide domains may include alterations that reduce or eliminate an activity thereof.

[0687] In some instances, components of the base editing system are associated with one another through the interaction of multimeric antibodies or fragments thereof (e.g., IgG, IgD, IgA, IgM, IgE, a heavy chain domain 2 (CH₂) of IgM (MHD2) or IgE (EHD2), an immunoglobulin Fc region, a heavy chain domain 3 (CH3) of IgG or IgA, a heavy chain domain 4 (CH4) of IgM or IgE, an Fab, and an Fab2). In some instances, the antibodies are dimeric, trimeric, or tetrameric. In embodiments, the dimeric antibodies bind a polypeptide or polynucleotide component of the base editing system.

[0688] In some cases, components of the base editing system are associated with one another through the interaction of a polynucleotide-binding protein domain(s) with a polynucleotide(s). In some instances, components of the base editing system are associated with one another through the interaction of one or more polynucleotide-binding protein domains with polynucleotides that are self-complementary and/or complementary to one another so that complementary binding of the polynucleotides to one another brings into association their respective bound polynucleotide-binding protein domain(s).

[0689] In some instances, components of the base editing system are associated with one another through the interaction of a polypeptide domain(s) with a small molecule(s) (e.g., chemical inducers of dimerization (CIDs), also known as “dimerizers”). Non-limiting examples of CIDs include those disclosed in Amara, et al., “A versatile synthetic dimerizer for the regulation of protein-protein interactions,” PNAS, 94:10618-10623 (1997); and Voβ, et al. “Chemically induced dimerization: reversible and spatiotemporal control of protein function in cells,” Current Opinion in Chemical Biology, 28:194-201 (2015), the disclosures of each of which are incorporated herein by reference in their entireties for all purposes. In some embodiments, the base editor inhibits base excision repair (BER) of the edited strand. In some embodiments, the base editor protects or binds the non-edited strand. In some embodiments, the base editor comprises UGI activity or USP activity. In some embodiments, the base editor comprises a catalytically inactive inosine-specific nuclease.

[0690] The base editors of the present disclosure can comprise any domain, feature or amino acid sequence which facilitates the editing of a target polynucleotide sequence. For example, in some embodiments, the base editor comprises a nuclear localization sequence (NLS). In some embodiments, an NLS of the base editor is localized between a deaminase domain and a polynucleotide programmable nucleotide binding domain. In some embodiments, an NLS of the base editor is localized C-terminal to a polynucleotide programmable nucleotide binding domain.

[0691] Protein domains included in the fusion protein can be a heterologous functional domain. Non-limiting examples of protein domains which can be included in the fusion protein include a deaminase domain (e.g., cytidine deaminase and/or adenosine deaminase), a uracil glycosylase inhibitor (UGI) domain, epitope tags, and reporter gene sequences.

[0692] In some embodiments, the adenosine base editor (ABE) can deaminate adenine in DNA. In some embodiments, ABE is generated by replacing APOBEC1 component of BE3 with natural or engineered E. coli TadA, human ADAR2, mouse ADA, or human ADAT2. In some embodiments, ABE comprises an evolved TadA variant. In some embodiments, the base editor is ABE8.1, which comprises or consists essentially of the following sequence or a fragment thereof having adenosine deaminase activity: SEQ ID NO: 331. Other ABE8 sequences are provided in the attached sequence listing (SEQ ID NOs: 332-354).

[0693] In some embodiments, the base editor includes an adenosine deaminase variant comprising an amino acid sequence, which contains alterations relative to an ABE 7*10 reference sequence, as described herein. The term “monomer” as used in Table 7 refers to a monomeric form of TadA*7.10 comprising the alterations described. The term “heterodimer” as used in Table 7 refers to the specified wild-type E. coli TadA adenosine deaminase fused to a TadA*7.10 comprising the alterations as described.

TABLE 7
Adenosine Deaminase Base Editor Variants

| | Adenosine | |
|---|---|---|
| ABE | Deaminase | Adenosine Deaminase Description |
| ABE-605m | MSP605 | monomer_TadA*7.10 + V82G + Y147T + Q154S |
| ABE-680m | MSP680 | monomer_TadA*7.10 + I76Y + V82G + Y147T + Q154S |
| ABE-823m | MSP823 | monomer_TadA*7.10 + L36H + V82G + Y147T + Q154S + |
| | | N157K |
| ABE-824m | MSP824 | monomer_TadA*7.10 + V82G + Y147D + F149Y + Q154S + |
| | | D167N |
| ABE-825m | MSP825 | monomer_TadA*7.10 + L36H + V82G + Y147D + F149Y + |
| | | Q154S + N157K + D167N |
| ABE-827m | MSP827 | monomer_TadA*7.10 + L36H + I76Y + V82G + Y147T + |
| | | Q154S + N157K |
| ABE-828m | MSP828 | monomer_TadA*7.10 + I76Y + V82G + Y147D + F149Y + |
| | | Q154S + D167N |
| ABE-829m | MSP829 | monomer_TadA*7.10 + L36H + I76Y + V82G + Y147D + |
| | | F149Y + Q154S + N157K + D167N |
| ABE-605d | MSP605 | heterodimer_(WT) + (TadA*7.10 + V82G + Y147T + Q154S) |
| ABE-680d | MSP680 | heterodimer_(WT) + (TadA*7.10 + I76Y + V82G + Y147T + |
| | | Q154S) |
| ABE-823d | MSP823 | heterodimer_(WT) + (TadA*7.10 + L36H + V82G + Y147T + |
| | | Q154S + N157K) |
| ABE-824d | MSP824 | heterodimer_(WT) + (TadA*7.10 + V82G + Y147D + F149Y + |
| | | Q154S + D167N) |
| ABE-825d | MSP825 | heterodimer_(WT) + (TadA*7.10 + L36H + V82G + Y147D + |
| | | F149Y + Q154S + N157K + D167N) |
| ABE-827d | MSP827 | heterodimer_(WT) + (TadA*7.10 + L36H + I76Y + V82G + |
| | | Y147T + Q154S + N157K) |
| ABE-828d | MSP828 | heterodimer_(WT) + (TadA*7.10 + I76Y + V82G + Y147D + |
| | | F149Y + Q154S + D167N) |
| ABE-829d | MSP829 | heterodimer_(WT) + (TadA*7.10 + L36H + I76Y + V82G + |
| | | Y147D + F149Y + Q154S + N157K + D167N) |

[0694] In some embodiments, the base editor comprises a domain comprising all or a portion (e.g., a functional portion) of a uracil glycosylase inhibitor (UGI) or a uracil stabilizing protein (USP) domain.

### Linkers

[0695] In certain embodiments, linkers may be used to link any of the peptides or peptide domains of the disclosure. The linker may be as simple as a covalent bond, or it may be a polymeric linker many atoms in length. In certain embodiments, the linker is a polypeptide or based on amino acids. In other embodiments, the linker is not peptide-like. In certain embodiments, the linker is a covalent bond (e.g., a carbon-carbon bond, disulfide bond, carbon-heteroatom bond, etc.).

[0696] In some embodiments, any of the fusion proteins provided herein, comprise a cytidine or adenosine deaminase and a Cas9 domain that are fused to each other via a linker. Various linker lengths and flexibilities between the cytidine or adenosine deaminase and the Cas9 domain can be employed (e.g., ranging from very flexible linkers of the form (GGGS) n (SEQ ID NO: 246), (GGGGS) n (SEQ ID NO: 247), and (G) n to more rigid linkers of the form (EAAAK) n (SEQ ID NO: 248), (SGGS) n (SEQ ID NO: 355), SGSETPGTSESATPES (SEQ ID NO: 249) (see, e.g., Guilinger J P, et al. Fusion of catalytically inactive Cas9 to FokI nuclease improves the specificity of genome modification. Nat. Biotechnol. 2014; 32 (6): 577-82; the entire contents are incorporated herein by reference) and (XP) n) in order to achieve the optimal length for activity for the cytidine or adenosine deaminase nucleobase editor. In some embodiments, n is 1, 2, 3, 4, 5, 6, 7, 8, 9, 10, 11, 12, 13, 14, or 15. In some embodiments, the linker comprises a (GGS) n motif, wherein n is 1, 3, or 7. In some embodiments, cytidine deaminase or adenosine deaminase and the Cas9 domain of any of the fusion proteins provided herein are fused via a linker comprising the amino acid sequence SGSETPGTSESATPES (SEQ ID NO: 249), which can also be referred to as the XTEN linker.

[0697] In some embodiments, the domains of the base editor are fused via a linker that comprises the amino acid sequence of:

(SEQ ID NO: 356)
SGGSSGSETPGTSESATPESSGGS,
(SEQ ID NO: 357)
SGGSSGGSSGSETPGTSESATPESSGGSSGGS,
or
(SEQ ID NO: 358)
GGSGGSPGSPAGSPTSTEEGTSESATPESGPGTSTEPSEGSAPGSPAGSP
TSTEEGTSTEPSEGSAPGTSTEPSEGSAPGTSESATPESGPGSEPATSGG
SGGS.

[0698] In some embodiments, domains of the base editor are fused via a linker comprising the amino acid sequence SGSETPGTSESATPES (SEQ ID NO: 249), which may also be referred to as the XTEN linker. In some embodiments, a linker comprises the amino acid sequence SGGS (SEQ ID NO: 355). In some embodiments, the linker is 24 amino acids in length. In some embodiments, the linker comprises the amino acid sequence SGGSSGGSSGSETPGTSESATPES (SEQ ID NO: 359). In some embodiments, the linker is 40 amino acids in length. In some embodiments, the linker comprises the amino acid sequence: SGGSSGGSSGSETPGTSESATPESSGGSSGGSSGGSSGGS (SEQ ID NO: 360). In some embodiments, the linker is 64 amino acids in length. In some embodiments, the linker comprises the amino acid sequence: SGGSSGGSSGSETPGTSESATPESSGGSSGGSSGGSSGGSSGSETPGTSESATPESSGGSSGGS (SEQ ID NO: 361). In some embodiments, the linker is 92 amino acids in length. In some embodiments, the linker comprises the amino acid sequence:

(SEQ ID NO: 362)
PGSPAGSPTSTEEGTSESATPESGPGTSTEPSEGSAPGSPAGSPTSTEE
GTSTEPSEGSAPGTSTEPSEGSAPGTSESATPESGPGSEPATS.

[0699] In some embodiments, a linker comprises a plurality of proline residues and is 5-21, 5-14, 5-9, 5-7 amino acids in length, e.g., PAPAP (SEQ ID NO: 363), PAPAPA (SEQ ID NO: 364), PAPAPAP (SEQ ID NO: 365), PAPAPAPA (SEQ ID NO: 366), P (AP) 4 (SEQ ID NO: 367), P (AP) 7 (SEQ ID NO: 368), P (AP) 10 (SEQ ID NO: 369) (see, e.g., Tan J, Zhang F, Karcher D, Bock R. Engineering of high-precision base editors for site-specific single nucleotide replacement. Nat Commun. 2019 Jan. 25; 10 (1): 439; the entire contents are incorporated herein by reference). Such proline-rich linkers are also termed “rigid” linkers.

Nucleic Acid Programmable DNA Binding Proteins with Guide RNAs

[0700] Provided herein are compositions and methods for base editing in cells. Further provided herein are compositions comprising a guide polynucleotide sequence, e.g., a guide RNA sequence, or a combination of 2, 3, 4, 5, 6, 7, 8, 9, 10, 11, 12, 13, 14, 15, 16, 17, 18, 19, 20, or more guide RNAs as provided herein. In some embodiments, a composition for base editing as provided herein further comprises a polynucleotide that encodes a base editor, e.g., a C-base editor or an A-base editor. For example, a composition for base editing may comprise a mRNA sequence encoding a BE, a BE4, an ABE, and a combination of one or more guide RNAs as provided. A composition for base editing may comprise a base editor polypeptide and a combination of one or more of any guide RNAs provided herein. Such a composition may be used to effect base editing in a cell through different delivery approaches, for example, electroporation, nucleofection, viral transduction or transfection. In some embodiments, the composition for base editing comprises an mRNA sequence that encodes a base editor and a combination of one or more guide RNA sequences provided herein for electroporation.

[0701] Some aspects of this disclosure provide systems comprising any of the fusion proteins or complexes provided herein, and a guide RNA bound to a nucleic acid programmable DNA binding protein (napDNAbp) domain (e.g., a Cas9 (e.g., a dCas9, a nuclease active Cas9, or a Cas9 nickase) or Cas12) of the fusion protein or complex. These complexes are also termed ribonucleoproteins (RNPs). In some embodiments, the guide nucleic acid (e.g., guide RNA) is from 15-100 nucleotides long and comprises a sequence of at least 10 contiguous nucleotides that is complementary to a target sequence. In some embodiments, the target sequence is a DNA sequence. In some embodiments, the target sequence is an RNA sequence. In some embodiments, the target sequence is a sequence in the genome of a bacteria, yeast, fungi, insect, plant, or animal. In some embodiments, the target sequence is a sequence in the genome of a human. In some embodiments, the 3′ end of the target sequence is immediately adjacent to a canonical PAM sequence (NGG). In some embodiments, the 3′ end of the target sequence is immediately adjacent to a non-canonical PAM sequence (e.g., a sequence listed in Table 3 or 5′-NAA-3′). In some embodiments, the guide nucleic acid (e.g., guide RNA) is complementary to a sequence in a gene of interest (e.g., a gene associated with a disease or disorder).

[0702] Some aspects of this disclosure provide methods of using the fusion proteins, or complexes provided herein. For example, some aspects of this disclosure provide methods comprising contacting a DNA molecule with any of the fusion proteins or complexes provided herein, and with at least one guide RNA, wherein the guide RNA is about 15-100 nucleotides long and comprises a sequence of at least 10 contiguous nucleotides that is complementary to a target sequence.

[0703] The domains of the base editor disclosed herein can be arranged in any order.

[0704] A defined target region can be a deamination window. A deamination window can be the defined region in which a base editor acts upon and deaminates a target nucleotide. In some embodiments, the deamination window is within a 2, 3, 4, 5, 6, 7, 8, 9, or 10 base regions. In some embodiments, the deamination window is 5, 6, 7, 8, 9, 10, 11, 12, 13, 14, 15, 16, 17, 18, 19, 20, 21, 22, 23, 24, or 25 bases upstream of the PAM.

[0705] The base editors of the present disclosure can comprise any domain, feature or amino acid sequence which facilitates the editing of a target polynucleotide sequence.

### Methods of Using Fusion Proteins or Complexes Comprising a Cytidine or Adenosine Deaminase and a Cas9 Domain

[0706] Some aspects of this disclosure provide methods of using the fusion proteins, or complexes provided herein. For example, some aspects of this disclosure provide methods comprising contacting a DNA molecule with any of the fusion proteins or complexes provided herein, and with at least one guide RNA described herein.

[0707] In some embodiments, a fusion protein or complex of the disclosure is used for editing a target gene of interest. In particular, a cytidine deaminase or adenosine deaminase nucleobase editor described herein is capable of making multiple mutations within a target sequence. These mutations may affect the function of the target. For example, when a cytidine deaminase or adenosine deaminase nucleobase editor is used to target a regulatory region the function of the regulatory region is altered and the expression of the downstream protein is reduced or eliminated.

### Base Editor Efficiency

[0708] In some embodiments, the purpose of the methods provided herein is to alter a gene and/or gene product via gene editing. The nucleobase editing proteins provided herein can be used for gene editing-based human therapeutics in vitro or in vivo. It will be understood by the skilled artisan that the nucleobase editing proteins provided herein, e.g., the fusion proteins or complexes comprising a polynucleotide programmable nucleotide binding domain (e.g., Cas9) and a nucleobase editing domain (e.g., an adenosine deaminase domain or a cytidine deaminase domain) can be used to edit a nucleotide from A to G or C to T.

[0709] Advantageously, base editing systems as provided herein provide genome editing without generating double-strand DNA breaks, without requiring a donor DNA template, and without inducing an excess of stochastic insertions and deletions as CRISPR may do. In some embodiments, the present disclosure provides base editors that efficiently generate an intended mutation, such as a STOP codon, in a nucleic acid (e.g., a nucleic acid within a genome of a subject) without generating a significant number of unintended mutations, such as unintended point mutations.

[0710] The base editors of the disclosure advantageously modify a specific nucleotide base encoding a protein without generating a significant proportion of indels (i.e., insertions or deletions). Such indels can lead to frame shift mutations within a coding region of a gene.

[0711] In some embodiments, the base editors provided herein are capable of generating a ratio of intended mutations to indels (i.e., intended point mutations: unintended point mutations) that is greater than 1:1. In some embodiments, the base editors provided herein are capable of generating a ratio of intended mutations to indels that is at least 1.5:1, at least 2:1, at least 2.5:1, at least 3:1, at least 3.5:1, at least 4:1, at least 4.5:1, at least 5:1, at least 5.5:1, at least 6:1, at least 6.5:1, at least 7:1, at least 7.5:1, at least 8:1, at least 10:1, at least 12:1, at least 15:1, at least 20:1, at least 25:1, at least 30:1, at least 40:1, at least 50:1, at least 100:1, at least 200:1, at least 300:1, at least 400:1, at least 500:1, at least 600:1, at least 700:1, at least 800:1, at least 900:1, or at least 1000:1, or more. The number of intended mutations and indels may be determined using any suitable method.

[0712] In some embodiments, the base editors provided herein can limit formation of indels in a region of a nucleic acid. In some embodiments, the region is at a nucleotide targeted by a base editor or a region within 2, 3, 4, 5, 6, 7, 8, 9, or 10 nucleotides of a nucleotide targeted by a base editor. In some embodiments, any of the base editors provided herein can limit the formation of indels at a region of a nucleic acid to less than 1%, less than 1.5%, less than 2%, less than 2.5%, less than 3%, less than 3.5%, less than 4%, less than 4.5%, less than 5%, less than 6%, less than 7%, less than 8%, less than 9%, less than 10%, less than 12%, less than 15%, or less than 20%.

[0713] Base editing is often referred to as a “modification”, such as, a genetic modification, a gene modification and modification of the nucleic acid sequence and is clearly understandable based on the context that the modification is a base editing modification. A base editing modification is therefore a modification at the nucleotide base level, for example as a result of the deaminase activity discussed throughout the disclosure, which then results in a change in the gene sequence and may affect the gene product.

[0714] In some embodiments, the modification, e.g., single base edit results in about or at least about a 10%, 15%, 20%, 25%, 30%, 35%, 40%, 45%, 50%, 55%, 60%, 65%, 70%, 75%, 80%, 85%, 90%, 95%, 99%, or 100% reduction, or reduction to an undetectable level, of the gene targeted expression.

[0715] The disclosure provides adenosine deaminase variants (e.g., ABE8 variants) that have increased efficiency and specificity. In particular, the adenosine deaminase variants described herein are more likely to edit a desired base within a polynucleotide and are less likely to edit bases that are not intended to be altered (e.g., “bystanders”).

[0716] In some embodiments, any of the base editing system comprising one of the ABE8 base editor variants described herein has reduced bystander editing or mutations by at least 1%, 2%, 3%, 4%, 5%, 10%, 15%, 20%, 25%, 30%, 35%, 40%, 45%, 50%, 55%, 60%, 65%, 70%, 75%, 80%, 85%, 90%, 95%, or 99% compared to a base editor system comprising an ABE7 base editor, e.g., ABE7.10.

[0717] In some embodiments, any of the ABE8 base editor variants described herein has higher base editing efficiency compared to the ABE7 base editors. In some embodiments, any of the ABE8 base editor variants described herein have at least 1%, 2%, 3%, 4%, 5%, 10%, 15%, 20%, 25%, 30%, 35%, 40%, 45%, 50%, 55%, 60%, 65%, 70%, 75%, 80%, 85%, 90%, 95%, 99%, 100%, 105%, 110%, 115%, 120%, 125%, 130%, 135%, 140%, 145%, 150%, 155%, 160%, 165%, 170%, 175%, 180%, 185%, 190%, 195%, 200%, 210%, 220%, 230%, 240%, 250%, 260%, 270%, 280%, 290%, 300%, 310%, 320%, 330%, 340%, 350%, 360%, 370%, 380%, 390%, 400%, 450%, or 500% higher base editing efficiency compared to an ABE7 base editor, e.g., ABE7.10.

[0718] The ABE8 base editor variants described herein may be delivered to a host cell via a plasmid, a vector, a LNP complex, or an mRNA. In some embodiments, any of the ABE8 base editor variants described herein is delivered to a host cell as an mRNA.

[0719] In some embodiments, the method described herein, for example, the base editing methods has minimum to no off-target effects. In some embodiments, the method described herein, for example, the base editing methods, has minimal to no chromosomal translocations.

[0720] In some embodiments, the base editing method described herein results in about 91%, 92%, 93%, 94%, 95%, 96%, 97%, 98%, 99% or 100% of a cell population that have been successfully edited.

[0721] In some embodiments, the percent of viable cells in a cell population following a base editing intervention is greater than at least 60%, 70%, 80%, or 90% of the starting cell population at the time of the base editing event. In some embodiments, the percent of viable cells in a cell population following editing is about 70%. In some embodiments, the percent of viable cells in a cell population following editing is about 75%. In some embodiments, the percent of viable cells in a cell population following editing is about 80%. In some embodiments, the percent of viable cells in a cell population as described above is about 85%. In some embodiments, the percent of viable cells in a cell population as described above is about 90%, or about 91%, 92%, 93%, 94% 95%, 96%, 97%, 98%, 99%, or 100% of the cells in the population at the time of the base editing event.

[0722] In embodiments, the cell population is a population of cells contacted with a base editor, complex, or base editor system of the present disclosure.

[0723] The number of intended mutations and indels can be determined using any suitable method, for example, as described in International PCT Application Nos. PCT/US2017/045381 (WO2018/027078) and PCT/US2016/058344 (WO2017/070632); Komor, A. C., et al., “Programmable editing of a target base in genomic DNA without double-stranded DNA cleavage” Nature 533, 420-424 (2016); Gaudelli, N. M., et al., “Programmable base editing of A·T to G·C in genomic DNA without DNA cleavage” Nature 551, 464-471 (2017); and Komor, A. C., et al., “Improved base excision repair inhibition and bacteriophage Mu Gam protein yields C:G-to-T:A base editors with higher efficiency and product purity” Science Advances 3: eaao4774 (2017); the entire contents of which are hereby incorporated by reference.

[0724] In some embodiments, to calculate indel frequencies, sequencing reads are scanned for exact matches to two 10-bp sequences that flank both sides of a window in which indels can occur. If no exact matches are located, the read is excluded from analysis. If the length of this indel window exactly matches the reference sequence the read is classified as not containing an indel. If the indel window is two or more bases longer or shorter than the reference sequence, then the sequencing read is classified as an insertion or deletion, respectively. In some embodiments, the base editors provided herein can limit formation of indels in a region of a nucleic acid. In some embodiments, the region is at a nucleotide targeted by a base editor or a region within 2, 3, 4, 5, 6, 7, 8, 9, or 10 nucleotides of a nucleotide targeted by a base editor.

### Multiplex Editing

[0725] In some embodiments, the base editor system provided herein is capable of multiplex editing of a plurality of nucleobase pairs in one or more genes or polynucleotide sequences. In some embodiments, the plurality of nucleobase pairs is located in the same gene or in one or more genes, wherein at least one gene is located in a different locus. In some embodiments, the multiplex editing comprises one or more guide polynucleotides. In some embodiments, the multiplex editing comprises one or more base editor systems. In some embodiments, the multiplex editing comprises one or more base editor systems with a single guide polynucleotide or a plurality of guide polynucleotides. In some embodiments, the multiplex editing comprises one or more guide polynucleotides with a single base editor system. It should be appreciated that the characteristics of the multiplex editing using any of the base editors as described herein can be applied to any combination of methods using any base editor provided herein. It should also be appreciated that the multiplex editing using any of the base editors as described herein can comprise a sequential editing of a plurality of nucleobase pairs.

[0726] In some embodiments, the base editor system capable of multiplex editing of a plurality of nucleobase pairs in one or more genes comprises one of ABE7, ABE8, and/or ABE9 base editors.

### CD117-Binding Polypeptides

Generation and Screening of Antibodies that Bind to a wild type CD117 Polypeptide or Peptide

[0727] Antibodies, including recombinantly produced antibodies, that specifically bind to wild type CD117 but show reduced binding to a CD117 variant polypeptide or peptide thereof (e.g., a variant produced by the methods provided herein) are provided and described herein. In embodiments, the antibodies are ABTx025, ABTx030, ABTx052, ABTx061, ABTx062, ABTx070, ABTx071, ABTx196, ABTx198, ABTx202, ABTx203, ABTx205, ABTx206, ABTx248, ABTx250, ABTx251, ABTx253, ABTx254, ABTx255, ABTx256, ABTx265, ABTx268, ABTx270, ABTx271, ABTx272, ABTx273, ABTx274, ABTx307, ABTx308, ABTx309, and ABTx313, or antigen binding portions thereof, as described herein.

[0728] Methods for generating antibodies against a protein or peptide of interest are known and practiced in the art. When animals are immunized with antigens they respond by generating a polyclonal antibody response comprised of many individual monoclonal antibody specificities. It is the sum of these individual specificities that make polyclonal antibodies useful in so many different assays. Individual monoclonal antibodies were originally isolated by immortalizing individual B cells using hybridoma technology (Kohler and Milstein, Nature 256, 495, 2011), in which B cells from an immunized animal are fused with a myeloma cell. With the advent of molecular biology, in vitro methods to generate antibodies against proteins of interest, such as wild type CD117, have been developed.

[0729] The terms “antigen of interest” or “target protein” are used herein interchangeably and refer generally to the agent recognized and specifically bound by an antibody. In an embodiment, such an antigen of interest or target protein is the wild type CD117 polypeptide, or an antigenic and/or immunogenic portion thereof.

[0730] An antibody is a polypeptide chain-containing molecular structure with a specific shape that specifically binds an epitope, where one or more non-covalent binding interactions stabilize the complex between the molecular structure and the epitope. In one embodiment, an antibody molecule is an immunoglobulin (e.g., IgG, IgM, IgA, IgE, IgD). Antibodies from a variety of sources, e.g., human, rodent, rabbit, cow, sheep, pig, dog, or fowl are considered “antibodies.” Numerous antibody coding sequences have been described; and others may be raised by methods well-known in the art.

[0731] For example, antibodies or antigen binding fragments may be produced by genetic engineering. Antibody coding sequences of interest include those encoded by native sequences, as well as nucleic acids that, by virtue of the degeneracy of the genetic code, are not identical in sequence to a wild type nucleic acid sequence. Variant polypeptides can include amino acid (aa) substitutions, additions or deletions. The amino acid substitutions can be conservative amino acid substitutions or substitutions to eliminate non-essential amino acids, such as to alter a glycosylation site, or to minimize misfolding by substitution or deletion of one or more cysteine residues that are not necessary for function. Variants can be designed so as to retain or have enhanced biological activity of a particular region of the protein (e.g., a functional domain, catalytic amino acid residues). Variants also include fragments of the polypeptides disclosed herein, particularly biologically active fragments and/or fragments corresponding to functional domains. Techniques for in vitro mutagenesis of cloned genes are known. Also included in some aspects and embodiments herein are polypeptides that have been modified using ordinary molecular biological techniques so as to improve their resistance to proteolytic degradation or to optimize solubility properties or to render them more suitable as a therapeutic agent.

[0732] Chimeric antibodies may be made by recombinant means by combining the variable light and heavy chain regions obtained from antibody producing cells of one species with the constant light and heavy chain regions from another. Typically, chimeric antibodies utilize rodent or rabbit variable regions and human constant regions, in order to produce an antibody with predominantly human domains. The production of such chimeric antibodies is well known in the art and may be achieved by standard means (as described, e.g., in U.S. Pat. No. 5,624,659, incorporated fully herein by reference).

[0733] Humanized antibodies are engineered to contain even more human-like immunoglobulin domains and incorporate only the complementarity-determining regions of the animal-derived antibody. This is accomplished by carefully examining the sequence of the hyper-variable loops of the variable regions of the monoclonal antibody and fitting them to the structure of the human antibody chains. Although apparently complex, the process is straightforward in practice. See, e.g., U.S. Pat. No. 6,187,287, incorporated fully herein by reference.

[0734] In addition to entire immunoglobulins (or their recombinant counterparts), immunoglobulin fragments comprising the epitope binding site (e.g., Fab′, F(ab′)2, or other fragments) may be synthesized. “Fragment,” or minimal immunoglobulins may be designed utilizing recombinant immunoglobulin techniques. For instance, “Fv” immunoglobulins for use in some aspects and embodiments herein may be produced by synthesizing a variable light chain region and a variable heavy chain region. Combinations of antibodies are also of interest, e.g., diabodies, which comprise two distinct Fv specificities.

[0735] Immunoglobulins may be modified post-translationally, e.g., to add chemical linkers, detectable moieties, such as fluorescent dyes, enzymes, substrates, chemiluminescent moieties and the like, or specific binding moieties, such as streptavidin, avidin, or biotin, and the like may be utilized in the methods and compositions of some aspects and embodiments herein.

### Screening of Libraries for CD117-Binding Polypeptides or Peptides

[0736] Methods for high throughput screening of polypeptide (e.g., antibody or antigen-binding antibody fragment) libraries for molecules capable of binding to the wild type CD117 polypeptide or peptide (and/or epitopes within the CD117 polypeptide or peptide) include, without limitation, display techniques including phage display, bacterial display, yeast display, mammalian display, ribosome display, mRNA display, and cDNA display. The use of phage display to isolate ligands that bind biologically relevant molecules has been reviewed, e.g., in Felici et al. (Biotechnol. Annual Rev. 1:149-183, 1995), Katz (Annual Rev. Biophys. Biomol. Struct. 26:27-45, 1997), and Hoogenboom et al. (Immunotechnology 4:1-20, 1998). Several randomized combinatorial peptide libraries have been constructed to select for polypeptides that bind different targets, e.g., cell surface receptors or DNA (reviewed by Kay (Perspect. Drug Discovery Des. 2, 251-268, 1995), Kay et al., (Mol. Divers. 1:139-140, 1996)). Proteins and multimeric proteins have been successfully phage-displayed as functional molecules (see. e.g., EP 0349578A, EP 4527839A, EP 0589877A; Chiswell and McCafferty (Trends Biotechnol. 10, 80-84 1992)). In addition, functional antibody fragments (e.g., Fab, single-chain Fv [scFv]) have been expressed as reported by McCafferty et al. (Nature 348:552-554, 1990), Barbas et al. (Proc. Natl. Acad Sci. USA 88:7978-7982, 1991), and Clackson et al. (Nature 352:624-628, 1991). These references are hereby incorporated by reference in their entirety.

[0737] In addition to generating CD117 binding polypeptides (e.g., CD117 binding polypeptides, antibodies, and antigen-binding fragments thereof) of some aspects and embodiments herein, in vitro display techniques, which are known and practiced in the art, also provide methods for improving the affinity of an anti-CD117 variant-binding polypeptide, antibody, or antigen-binding fragments thereof. For instance, rather than screening libraries of antibodies and fragments thereof containing completely randomized hypervariable regions, narrower libraries of antibodies and antigen-binding fragments thereof that feature targeted mutations at specific sites within hypervariable regions can be screened. This can be accomplished, for example, by assembling libraries of polynucleotides encoding antibodies or antigen-binding fragments thereof that encode random mutations only at particular sites within hypervariable regions. These polynucleotides can then be expressed in, e.g., filamentous phage, bacterial cells, yeast cells, mammalian cells, or in vitro using, e.g., ribosome display, mRNA display, or cDNA display techniques in order to screen for antibodies or antigen-binding fragments thereof that specifically bind to the wild type CD117 polypeptide or peptide (and epitopes thereof) with improved binding affinity. Yeast display, for instance, is well-suited for affinity maturation, and has been used previously to improve the affinity of a single-chain antibody to a K_{D} of 48 fM (Boder et al. (Proc Natl Acad Sci USA 97:10701, 2000)).

[0738] Additional in vitro techniques that can be used for the generation and affinity maturation of CD117-binding polypeptides, antibodies, and antigen-binding fragments thereof (e.g., single-chain polypeptides, antibodies, and antigen-binding fragments thereof) of some aspects and embodiments herein include the screening of combinatorial libraries of antibodies or antigen-binding fragments thereof for functional molecules capable of specifically binding to peptides derived from the CD117 polypeptide. Combinatorial antibody libraries can be obtained, e.g., by expression of polynucleotides encoding randomized hypervariable regions of an antibody or antigen-binding fragment thereof in a eukaryotic or prokaryotic cell. This can be achieved, e.g., using gene expression techniques described herein or known in the art. Heterogeneous mixtures of antibodies can be purified, e.g., by Protein A or Protein G selection, sizing column chromatography), centrifugation, differential solubility, and/or by any other standard technique for the purification of proteins. Libraries of combinatorial libraries thus obtained can be screened, e.g., by incubating a heterogeneous mixture of these antibodies with a peptide derived from the CD117 polypeptide that has been immobilized to a surface for a period of time sufficient to allow antibody-antigen binding. Non-binding antibodies or fragments thereof can be removed by washing the surface with an appropriate buffer (e.g., a solution buffered at physiological pH (approximately 7.4) and containing physiological salt concentrations and ionic strength, and optionally containing a detergent, such as TWEEN-20®). Antibodies that remain bound can subsequently be detected, e.g., using an ELISA-based detection protocol (see, e.g., U.S. Pat. No. 4,661,445; incorporated herein by reference).

[0739] Additional techniques for screening combinatorial libraries of polypeptides (e.g., antibodies, and antigen-binding fragments thereof) for those that specifically bind to CD117 polypeptide-derived peptides include the screening of one-bead-one-compound libraries of antibody fragments. Antibody fragments can be chemically synthesized on a solid bead (e.g., using established split-and-pool solid phase peptide synthesis protocols) composed of a hydrophilic, water-swellable material such that each bead displays a single antibody fragment. Heterogeneous bead mixtures can then be incubated with a CD117 polypeptide-derived peptide that is optionally labeled with a detectable moiety (e.g., a fluorescent dye) or that is conjugated to an epitope tag (e.g., biotin, avidin, FLAG tag, HA tag) that can later be detected by treatment with a complementary tag (e.g., avidin, biotin, anti-FLAG antibody, anti-HA antibody, respectively). Beads containing antibody portions or fragments that specifically bind to CD117 polypeptide-derived peptide can be identified by analyzing the fluorescent properties of the beads following incubation with a fluorescently-labeled antigen or complementary tag (e.g., by confocal fluorescent microscopy or by fluorescence-activated bead sorting; see, e.g., Muller et al. (J. Biol. Chem., 16500-16505, 1996); incorporated herein by reference). Beads containing antibody fragments that specifically bind to CD117 polypeptide-derived peptides can thus be separated from those that do not contain high-affinity antibody fragments. The sequence of an antibody fragment that specifically binds to a CD117 polypeptide-derived peptide can be determined by techniques known in the art, including, e.g., Edman degradation, tandem mass spectrometry, matrix-assisted laser-desorption time-of-flight mass spectrometry (MALDI-TOF MS), nuclear magnetic resonance (NMR), and 2D gel electrophoresis, among others (see, e.g., WO 2004/062553; incorporated herein by reference).

### Methods of Identifying Antibodies and Ligands

[0740] Methods for high throughput screening of antibody, antibody fragment, and ligand libraries for molecules capable of binding the CD117 polypeptide or peptide can be used to identify antibodies suitable for the uses as described herein. Such methods include in vitro display techniques known in the art, such as phage display, bacterial display, yeast display, mammalian cell display, ribosome display, mRNA display, and cDNA display, among others. The use of phage display to isolate ligands that bind biologically relevant molecules has been reviewed, for example, in Felici et al., Biotechnol. Annual Rev. 1:149-183, 1995; Katz, Annual Rev. Biophys. Biomol. Struct. 26:27-45, 1997; and Hoogenboom et al., Immunotechnology 4:1-20, 1998, the disclosures of each of which are incorporated herein by reference as they pertain to in vitro display techniques. Randomized combinatorial peptide libraries have been constructed to select for polypeptides that bind cell surface antigens as described in Kay, Perspect. Drug Discovery Des. 2:251-268, 1995 and Kay et al., Mol. Divers. 1:139-140, 1996, the disclosures of each of which are incorporated herein by reference as they pertain to the discovery of antigen-binding molecules. Proteins, such as multimeric proteins, have been successfully phage-displayed as functional molecules (see, for example, EP 0349578; EP 4527839; and EP 0589877, as well as Chiswell and McCafferty, Trends Biotechnol. 10:80-84 1992, the disclosures of each of which are incorporated herein by reference as they pertain to the use of in vitro display techniques for the discovery of antigen-binding molecules). In addition, functional antibody fragments, such as Fab and scFv fragments, have been expressed in in vitro display formats (see, for example, McCafferty et al., Nature 348:552-554, 1990; Barbas et al., Proc. Natl. Acad. Sci. USA 88:7978-7982, 1991; and Clackson et al., Nature 352:624-628, 1991, the disclosures of each of which are incorporated herein by reference as they pertain to in vitro display platforms for the discovery of antigen-binding molecules). These techniques, among others, can be used to identify and improve the affinity of antibodies that bind to the CD117 polypeptide or peptide.

### Host Cells for Expression of Antibodies

[0741] Mammalian cells can be co-transfected with polynucleotides encoding the antibodies of some aspects and embodiments herein, which are expressed as recombinant polypeptides, and assembled into anti-CD117 antibodies by the host cell. In one embodiment, a mammalian cell is co-transfected with polynucleotides encoding the heavy and light chains of an anti-CD117 polypeptide antibody, which are expressed in the cell and assembled as the anti-CD117 antibody.

[0742] It is possible to express antibodies or antigen-binding fragments thereof in either prokaryotic or eukaryotic host cells. In certain embodiments, expression of polypeptides or antigen-binding fragments thereof is performed in eukaryotic cells, e.g., mammalian host cells, for optimal secretion of a properly folded and immunologically active antibody. Exemplary, nonlimiting mammalian host cells for expressing the recombinant antibodies or antigen-binding fragments thereof of some aspects and embodiments herein include Chinese Hamster Ovary (CHO cells) (including DHFR CHO cells, described in Urlaub and Chasin (1980, Proc. Natl. Acad. Sci. USA 77:4216-4220), used with a DHFR selectable marker, e.g., as described in Kaufman and Sharp (1982, Mol. Biol. 159:601-621), NSO myeloma cells, COS cells, HEK293T cells, SP2/0, NIH3T3, and BaF3 cells. Additional, nonlimiting cell types that may be useful for the expression of antibodies and fragments thereof include bacterial cells, such as BL-21 (DE3) E. coli cells, which can be transformed with vectors containing foreign DNA according to established protocols. Additional eukaryotic cells that may be useful for expression of antibodies include yeast cells, such as auxotrophic strains of S. cerevisiae, which can be transformed and selectively grown in incomplete medium according to established procedures known in the art. When recombinant expression vectors encoding antibody genes are introduced into mammalian host cells, the antibodies are produced by culturing the host cells for a period of time sufficient to allow for expression of the antibody protein in the host cells or secretion of the antibody into the culture medium in which the host cells are grown.

[0743] Polypeptides (e.g., antibodies or antigen-binding fragments thereof) can be recovered from the culture medium using standard protein purification methods. Host cells can also be used to produce portions of intact antibodies, such as Fab fragments or scFv molecules. Also included in some aspects and embodiments herein are methods in which the above procedure is varied according to established protocols known in the art. For example, it may be desirable to transfect a host cell with DNA encoding either the light chain or the heavy chain (but not both) of an anti-CD117 antibody of some aspects and embodiments herein in order to produce an antigen-binding fragment of the antibody.

[0744] Once a CD117-binding polypeptide (e.g., an anti-CD117 polypeptide antibody or an antigen-binding fragment thereof) of some aspects and embodiments herein has been produced by recombinant expression, it can be purified by any method known in the art, such as a method useful for purification of an immunoglobulin molecule, for example, by chromatography (e.g., ion exchange, affinity, affinity for antigen (e.g., a CD117 polypeptide or peptide) after Protein A or Protein G selection, and sizing column chromatography), centrifugation, differential solubility, or by any other standard technique for the purification of proteins. Further, a CD117 polypeptide (e.g., an anti-CD117 antibody of some aspects and embodiments described herein) or an antigen-binding portion or fragment thereof, can be fused to heterologous polypeptide sequences as known in the art, for example, to facilitate purification, e.g., a histidine tag, a detectable/detectably labeled marker, and the like.

[0745] Once isolated, an anti-CD117 antibody, or antigen-binding portion or fragment thereof can, if desired, be further purified, e.g., by high performance liquid chromatography (see, e.g., Fisher, Laboratory Techniques in Biochemistry and Molecular Biology (Work and Burdon, eds., Elsevier, 1980); incorporated herein by reference), or by gel filtration chromatography, such as on a Superdex. TM. 75 column (Pharmacia Biotech AB, Uppsala, Sweden).

### Mapping Epitopes of the CD117 Polypeptide

[0746] Anti-CD117 antibodies, and antigen-binding fragments thereof, can be produced by screening libraries of polypeptides (e.g., antibodies and antigen-binding fragments thereof) for functional molecules that are capable of binding to a wild type CD117 polypeptide or peptide that selectively bind to the wild type CD117 polypeptide or peptide compared with CD117 polypeptide variant polypeptides or peptides containing alterations, such as those provided herein. Epitopes can be modeled by screening antibodies or antigen-binding fragments thereof against a series of linear or cyclic peptides containing residues that correspond to a desired epitope within a CD117 polypeptide or peptide.

[0747] As an example, peptides containing individual fragments isolated from the CD117 polypeptide or peptide can be synthesized by peptide synthesis techniques known in the art. These peptides can be immobilized on a solid surface and screened for molecules that bind to anti-CD117 antibodies and antigen-binding fragments thereof, such as representative antibodies ABTx025, ABTx030, ABTx052, ABTx061, ABTx062, ABTx070, and ABTx071, or antigen binding portions thereof, as described herein, e.g., using an ELISA-based screening platform using established procedures. Using this assay, peptides that specifically bind to the anti-CD117 antibodies with high affinity therefore contain residues within epitopes of the CD117 polypeptide antigen that preferentially bind these antibodies. Peptides identified in this manner can be used to screen libraries of antibodies and antigen-binding fragments thereof in order to identify anti-CD117 antibodies useful in generating anti-CD117 antibodies of some aspects and embodiments herein.

### Delivery Systems

### Nucleic Acid-Based Delivery of Base Editor Systems

[0748] Nucleic acid molecules encoding a base editor system according to the present disclosure can be administered to subjects or delivered into cells in vitro or in vivo by art-known methods or as described herein. For example, a base editor system comprising a deaminase (e.g., cytidine or adenine deaminase) can be delivered by vectors (e.g., viral or non-viral vectors), or by naked DNA, DNA complexes, lipid nanoparticles, or a combination of the aforementioned compositions. A base editor system may be delivered to a cell using any methods available in the art including, but not limited to, physical methods (e.g., electroporation, particle gun, calcium phosphate transfection), viral methods, non-viral methods (e.g., liposomes, cationic methods, lipid nanoparticles, polymeric nanoparticles), or biological non-viral methods (e.g., attenuated bacterial, engineered bacteriophages, mammalian virus-like particles, biological liposomes, erythrocyte ghosts, exosomes).

[0749] Nanoparticles, which can be organic or inorganic, are useful for delivering a base editor system or component thereof. Nanoparticles are well known in the art and any suitable nanoparticle can be used to deliver a base editor system or component thereof, or a nucleic acid molecule encoding such components. In one example, organic (e.g., lipid and/or polymer) nanoparticles are suitable for use as delivery vehicles in certain embodiments of this disclosure. Non-limiting examples of lipid nanoparticles suitable for use in the methods of the present disclosure include those described in International Patent Application Publications No. WO2022140239, WO2022140252, WO2022140238, WO2022159421, WO2022159472, WO2022159475, WO2022159463, WO2021113365, and WO2021141969, the disclosures of each of which is incorporated herein by reference in its entirety for all purposes.

### Viral Vectors

[0750] A base editor described herein can be delivered with a viral vector. In some embodiments, a base editor disclosed herein can be encoded on a nucleic acid that is contained in a viral vector. In some embodiments, one or more components of the base editor system can be encoded on one or more viral vectors.

[0751] Viral vectors can include lentivirus (e.g., HIV and FIV-based vectors), Adenovirus (e.g., AD100), Retrovirus (e.g., Maloney murine leukemia virus, MML-V), herpesvirus vectors (e.g., HSV-2), and Adeno-associated viruses (AAVs), or other plasmid or viral vector types, in particular, using formulations and doses from, for example, U.S. Pat. No. 8,454,972 (formulations, doses for adenovirus), U.S. Pat. No. 8,404,658 (formulations, doses for AAV) and U.S. Pat. No. 5,846,946 (formulations, doses for DNA plasmids) and from clinical trials and publications regarding the clinical trials involving lentivirus, AAV and adenovirus. For example, for AAV, the route of administration, formulation and dose can be as in U.S. Pat. No. 8,454,972 and as in clinical trials involving AAV. For Adenovirus, the route of administration, formulation and dose can be as in U.S. Pat. No. 8,404,658 and as in clinical trials involving adenovirus. For plasmid delivery, the route of administration, formulation and dose can be as in U.S. Pat. No. 5,846,946 and as in clinical studies involving plasmids. Doses can be based on or extrapolated to an average 70 kg individual (e.g., a male adult human), and can be adjusted for patients, subjects, mammals of different weight and species. Frequency of administration is within the ambit of the medical or veterinary practitioner (e.g., physician, veterinarian), depending on usual factors including the age, sex, general health, other conditions of the patient or subject and the particular condition or symptoms being addressed. The viral vectors can be injected into the tissue of interest. For cell-type specific base editing, the expression of the base editor and optional guide nucleic acid can be driven by a cell-type specific promoter.

[0752] Viral vectors can be selected based on the application. For example, for in vivo gene delivery, AAV can be advantageous over other viral vectors. In some embodiments, AAV allows low toxicity, which can be due to the purification method not requiring ultra-centrifugation of cell particles that can activate the immune response. In some embodiments, AAV allows low probability of causing insertional mutagenesis because it doesn't integrate into the host genome. Adenoviruses are commonly used as vaccines because of the strong immunogenic response they induce. Packaging capacity of the viral vectors can limit the size of the base editor that can be packaged into the vector.

[0753] AAV has a packaging capacity of about 4.5 Kb or 4.75 Kb including two 145 base inverted terminal repeats (ITRs). This means disclosed base editor as well as a promoter and transcription terminator can fit into a single viral vector. Constructs larger than 4.5 or 4.75 Kb can lead to significantly reduced virus production. For example, SpCas9 is quite large, the gene itself is over 4.1 Kb, which makes it difficult for packing into AAV. Therefore, embodiments of the present disclosure include utilizing a disclosed base editor which is shorter in length than conventional base editors. In some examples, the base editors are less than 4 kb. Disclosed base editors can be less than 4.5 kb, 4.4 kb, 4.3 kb, 4.2 kb, 4.1 kb, 4 kb, 3.9 kb, 3.8 kb, 3.7 kb, 3.6 kb, 3.5 kb, 3.4 kb, 3.3 kb, 3.2 kb, 3.1 kb, 3 kb, 2.9 kb, 2.8 kb, 2.7 kb, 2.6 kb, 2.5 kb, 2 kb, or 1.5 kb. In some embodiments, the disclosed base editors are 4.5 kb or less in length.

[0754] An AAV can be AAV1, AAV2, AAV5, AAV6 or any combination thereof. One can select the type of AAV with regard to the cells to be targeted; e.g., one can select AAV serotypes 1, 2, 5 or a hybrid capsid AAV1, AAV2, AAV5 or any combination thereof for targeting brain or neuronal cells; and one can select AAV4 for targeting cardiac tissue. AAV8 is useful for delivery to the liver. A tabulation of certain AAV serotypes as to these cells can be found in Grimm, D. et al, J. Virol. 82:5887-5911 (2008)).

[0755] In some embodiments, lentiviral vectors are used to transduce a cell of interest with a polynucleotide encoding a base editor or base editor system as provided herein. Lentiviruses are complex retroviruses that have the ability to infect and express their genes in both mitotic and post-mitotic cells. The most commonly known lentivirus is the human immunodeficiency virus (HIV), which uses the envelope glycoproteins of other viruses to target a broad range of cell types.

[0756] In another embodiment, minimal non-primate lentiviral vectors based on the equine infectious anemia virus (EIAV) are also contemplated. In another embodiment, RetinoStat®, an equine infectious anemia virus-based lentiviral gene therapy vector that expresses angiostatic proteins endostatin and angiostatin that is contemplated to be delivered via a subretinal injection. In another embodiment, use of self-inactivating lentiviral vectors are contemplated.

[0757] Any RNA of the systems, for example a guide RNA or a base editor-encoding mRNA, can be delivered in the form of RNA. Base editor-encoding mRNA can be generated using in vitro transcription. For example, nuclease mRNA can be synthesized using a PCR cassette containing the following elements: T7 promoter, optional kozak sequence (GCCACC), nuclease sequence, and 3′ UTR such as a 3′ UTR from beta globin-polyA tail. The cassette can be used for transcription by T7 polymerase. Guide polynucleotides (e.g., gRNA) can also be transcribed using in vitro transcription from a cassette containing a T7 promoter, followed by the sequence “GG”, and guide polynucleotide sequence.

### Non-Viral Platforms for Gene Transfer

[0758] Non-viral platforms for introducing a heterologous polynucleotide into a cell of interest are known in the art.

[0759] For example, the disclosure provides a method of inserting a heterologous polynucleotide into the genome of a cell using a Cas9 or Cas12 (e.g., Cas12b) ribonucleoprotein complex (RNP)-DNA template complex where an RNP including a Cas9 or Cas12 nuclease domain and a guide RNA, wherein the guide RNA specifically hybridizes to a target region of the genome of the cell, and wherein the Cas9 nuclease domain cleaves the target region to create an insertion site in the genome of the cell. A DNA template is then used to introduce a heterologous polynucleotide. In embodiments, the DNA template is a double-stranded or single-stranded DNA template, wherein the size of the DNA template is about 200 nucleotides or is greater than about 200 nucleotides, wherein the 5′ and 3′ ends of the DNA template comprise nucleotide sequences that are homologous to genomic sequences flanking the insertion site. In some embodiments, the DNA template is a single-stranded circular DNA template. In embodiments, the molar ratio of RNP to DNA template in the complex is from about 3:1 to about 100:1.

[0760] In some embodiments, the DNA template is a linear DNA template. In some examples, the DNA template is a single-stranded DNA template. In certain embodiments, the single-stranded DNA template is a pure single-stranded DNA template. In some embodiments, the single stranded DNA template is a single-stranded oligodeoxynucleotide (ssODN).

[0761] In other embodiments, a single-stranded DNA (ssDNA) can produce efficient HDR with minimal off-target integration. In one embodiment, an ssDNA phage is used to efficiently and inexpensively produce long circular ssDNA (cssDNA) donors. These cssDNA donors serve as efficient HDR templates when used with Cas9 or Cas12 (e.g., Cas12a, Cas12b), with integration frequencies superior to linear ssDNA (IssDNA) donors.

### Inteins

[0762] Inteins (intervening protein) are auto-processing domains found in a variety of diverse organisms, which carry out a process known as protein splicing.

[0763] Non-limiting examples of inteins include any intein or intein-pair known in the art, which include a synthetic intein based on the dnaE intein, the Cfa-N (e.g., split intein-N) and Cfa-C (e.g., split intein-C) intein pair, has been described (e.g., in Stevens et al., J Am Chem Soc. 2016 Feb. 24; 138 (7): 2162-5, incorporated herein by reference), and DnaE. Non-limiting examples of pairs of inteins that may be used in accordance with the present disclosure include: Cfa DnaE intein, Ssp GyrB intein, Ssp DnaX intein, Ter DnaE3 intein, Ter ThyX intein, Rma DnaB intein and Cne Prp8 intein (e.g., as described in U.S. Pat. No. 8,394,604, incorporated herein by reference). Exemplary nucleotide and amino acid sequences of inteins are provided in the Sequence Listing at SEQ ID NOs: 370-377 and 974-1009. Inteins suitable for use in embodiments of the present disclosure and methods for use thereof are described in U.S. Pat. No. 10,526,401, International Patent Application Publication No. WO 2013/045632, and in U.S. Patent Application Publication No. US 2020/0055900, the full disclosures of which are incorporated herein by reference in their entireties by reference for all purposes.

[0764] Intein-N and intein-C may be fused to the N-terminal portion of a split Cas9 and the C-terminal portion of the split Cas9, respectively, for the joining of the N-terminal portion of the split Cas9 and the C-terminal portion of the split Cas9. For example, in some embodiments, an intein-N is fused to the C-terminus of the N-terminal portion of the split Cas9, i.e., to form a structure of N—[N-terminal portion of the split Cas9]-[intein-N]—C. In some embodiments, an intein-C is fused to the N-terminus of the C-terminal portion of the split Cas9, i.e., to form a structure of N-[intein-C]—[C-terminal portion of the split Cas9]-C. In embodiments, a base editor is encoded by two polynucleotides, where one polynucleotide encodes a fragment of the base editor fused to an intein-N and another polynucleotide encodes a fragment of the base editor fused to an intein-C. Methods for designing and using inteins are known in the art and described, for example by WO2014004336, WO2017132580, WO2013045632A1, US20150344549, and US20180127780, each of which is incorporated herein by reference in their entirety.

[0765] In some embodiments, an ABE was split into N- and C-terminal fragments at Ala, Ser, Thr, or Cys residues within selected regions of SpCas9. These regions correspond to loop regions identified by Cas9 crystal structure analysis.

[0766] The N-terminus of each fragment is fused to an intein-N and the C-terminus of each fragment is fused to an intein C at amino acid positions S303, T310, T313, S355, A456, S460, A463, T466, S469, T472, T474, C574, S577, A589, and S590, referenced to SEQ ID NO: 197.

### Pharmaceutical Compositions

[0767] In some aspects, the present disclosure provides a pharmaceutical composition comprising any of the cells, polynucleotides, polypeptides, vectors, base editors, base editor systems, guide polynucleotides, fusion proteins, complexes, or the fusion protein-guide polynucleotide complexes described herein.

[0768] The pharmaceutical compositions of the present disclosure can be prepared in accordance with known techniques. See, e.g., Remington, The Science And Practice of Pharmacy (21st ed. 2005). In general, the cell, or population thereof is admixed with a suitable carrier prior to administration or storage, and in some embodiments, the pharmaceutical composition further comprises a pharmaceutically acceptable carrier. Suitable pharmaceutically acceptable carriers generally comprise inert substances that aid in administering the pharmaceutical composition to a subject, aid in processing the pharmaceutical compositions into deliverable preparations, or aid in storing the pharmaceutical composition prior to administration. Pharmaceutically acceptable carriers can include agents that can stabilize, optimize or otherwise alter the form, consistency, viscosity, pH, pharmacokinetics, solubility of the formulation. Such agents include buffering agents, wetting agents, emulsifying agents, diluents, encapsulating agents, and skin penetration enhancers. For example, carriers can include, but are not limited to, saline, buffered saline, dextrose, arginine, sucrose, water, glycerol, ethanol, sorbitol, dextran, sodium carboxymethyl cellulose, and combinations thereof.

[0769] In some embodiments, the pharmaceutical composition is formulated for delivery to a subject. Suitable routes of administrating the pharmaceutical composition described herein include, without limitation: topical, subcutaneous, transdermal, intradermal, intralesional, intraarticular, intraperitoneal, intravesical, transmucosal, gingival, intradental, intracochlear, transtympanic, intraorgan, epidural, intrathecal, intramuscular, intravenous, intravascular, intraosseus, periocular, intratumoral, intracerebral, and intracerebroventricular administration.

[0770] In some embodiments, the pharmaceutical composition described herein is administered locally to a diseased site (e.g., bone marrow). In some embodiments, the pharmaceutical composition described herein is administered to a subject by injection, by means of a catheter, by means of a suppository, or by means of an implant, the implant being of a porous, non-porous, or gelatinous material, including a membrane, such as a sialastic membrane, or a fiber.

[0771] In some embodiments, any of the fusion proteins, gRNAs, and/or complexes described herein are provided as part of a pharmaceutical composition. In some embodiments, the pharmaceutical composition comprises any of the fusion proteins or complexes provided herein. In some embodiments pharmaceutical composition comprises a gRNA, a nucleic acid programmable DNA binding protein, a cationic lipid, and a pharmaceutically acceptable excipient. In embodiments, pharmaceutical compositions comprise a lipid nanoparticle and a pharmaceutically acceptable excipient. In embodiments, the lipid nanoparticle contains a gRNA, a base editor, a complex, a base editor system, or a component thereof of the present disclosure, and/or one or more polynucleotides encoding the same. Pharmaceutical compositions can optionally comprise one or more additional therapeutically active substances.

[0772] The compositions, as described above, can be administered in effective amounts. The effective amount will depend upon the mode of administration, the particular condition being treated, and the desired outcome. It may also depend upon the stage of the condition, the age and physical condition of the subject, the nature of concurrent therapy, if any, and like factors well-known to the medical practitioner. For therapeutic applications, it is that amount sufficient to achieve a medically desirable result.

[0773] In some embodiments, compositions in accordance with the present disclosure can be used for treatment of any of a variety of diseases, disorders, and/or conditions.

### Kits

[0774] The disclosure provides kits for the treatment of a hemoglobinopathy (e.g., sickle cell disease) in a subject according to the methods provided herein. In some embodiments, the kit further includes a base editor system or a polynucleotide encoding a base editor system, wherein the base editor polypeptide system a nucleic acid programmable DNA binding protein (napDNAbp), a deaminase, and a guide RNA. In some embodiments, the napDNAbp is a Cas9 or Cas 12 polypeptide or variant thereof. In some embodiments, the polynucleotide encoding the base editor is a mRNA sequence. In some embodiments, the deaminase is an adenosine deaminase. In some embodiments, the kit comprises an edited cell and instructions regarding the use of such cell. In some instances, the kit comprises an anti-CD117 antibody (e.g., ABTx025, ABTx030, ABTx052, ABTx061, ABTx062, ABTx070, ABTx071, ABTx196, ABTx198, ABTx202, ABTx203, ABTx205, ABTx206, ABTx248, ABTx250, ABTx251, ABTx253, ABTx254, ABTx255, ABTx256, ABTx265, ABTx268, ABTx270, ABTx271, ABTx272, ABTx273, ABTx274, ABTx307, ABTx308, ABTx309, and/or ABTx313) suitable for use in the methods provided herein.

[0775] The kits may further comprise written instructions for using a base editor, base editor system and/or edited cell as described herein. In other embodiments, the instructions include at least one of the following: precautions; warnings; clinical studies; and/or references. The instructions may be printed directly on the container (when present), or as a label applied to the container, or as a separate sheet, pamphlet, card, or folder supplied in or with the container. In a further embodiment, a kit comprises instructions in the form of a label or separate insert (package insert) for suitable operational parameters. In yet another embodiment, the kit comprises one or more containers with appropriate positive and negative controls or control samples, to be used as standard(s) for detection, calibration, or normalization. The kit can further comprise a second container comprising a pharmaceutically-acceptable buffer, such as (sterile) phosphate-buffered saline, Ringer's solution, or dextrose solution. It can further include other materials desirable from a commercial and user standpoint, including other buffers, diluents, filters, needles, syringes, and package inserts with instructions for use.

[0776] The practice of the present disclosure employs, unless otherwise indicated, conventional techniques of molecular biology (including recombinant techniques), microbiology, cell biology, biochemistry and immunology, which are well within the purview of the skilled artisan. Such techniques are explained fully in the literature, such as, “Molecular Cloning: A Laboratory Manual”, second edition (Sambrook, 1989); “Oligonucleotide Synthesis” (Gait, 1984); “Animal Cell Culture” (Freshney, 1987); “Methods in Enzymology” “Handbook of Experimental Immunology” (Weir, 1996); “Gene Transfer Vectors for Mammalian Cells” (Miller and Calos, 1987); “Current Protocols in Molecular Biology” (Ausubel, 1987); “PCR: The Polymerase Chain Reaction”, (Mullis, 1994); “Current Protocols in Immunology” (Coligan, 1991). These techniques are applicable to the production of the polynucleotides and polypeptides of the disclosure, and, as such, may be considered in making and practicing the embodiments of the disclosure. Particularly useful techniques for particular embodiments will be discussed in the sections that follow.

[0777] The following examples are put forth so as to provide those of ordinary skill in the art with a complete disclosure and description of how to make and use the assay, screening, and therapeutic methods of the disclosure, and are not intended to limit the scope of what the inventors regard as their invention.

### EXAMPLES

### Example 1: Development of an Engineered Stem Cell Antibody-Paired Evasion (ESCAPE) Approach for Engraftment of Hematopoietic Stem Cells (HSCs) Engineered to Overexpress Fetal Hemoglobin

[0778] Experiments were undertaken to leverage base editing technologies to produce engineered hemopoietic stem cells (eHSCs) that could be coupled with a monoclonal antibody (mAb) strategy capable of clearing the niche of a patient's bone marrow to levels sufficient for eHSC engraftment and preserving eHSC viability in the presence of the conditioning mAb. Using base editing technology (see, e.g., FIGS. 34A and 34B), methods were developed to enhance the flexibility and potency of a non-genotoxic conditioning approach (e.g., use of monoclonal antibodies) through intentional, non-synonymous mutations within an epitope of an essential protein expressed on the surface of long-term HSCs (e.g., CD117). This essential, cell-surface variant protein was designed to selectively escape mAb-induced ablation. Contrastingly, unedited, or endogenous HSCs expressing wild type CD117 remained sensitive to mAb interference and were destroyed (FIGS. 1A, 1B, 2A-2D, and 12). Because the CD117 epitope-engineered HSCs were designed for transplant and to be resistant to a conditioning reagent, high concentrations of mAb can be used to clear the niche for engraftment, long half-lives of administered mAb conditioning reagent can be tolerated, and additional doses of mAb can be administered if required. The programmed epitope edits were combined with base editing strategies to upregulate fetal-hemoglobin production in erythroid cells, a mechanism that can ameliorate the effects of sickle cell disease.

[0779] An experiment was undertaken to screen 189 guide RNAs predicted in silico to be suitable for use with ABE8.8 for introducing an alteration to a CD117 polynucleotide (FIG. 3). 72 of the guides demonstrated high editing in HEK293 T cells. Of those 72 guides, 24 demonstrated editing in CD34+ cells. Of those 24 guides, 3 (i.e., CC128, CC79, and CC89) were identified as optimal for altering a CD117 polynucleotide sequence. CD117 polypeptide alterations corresponding to each of the three guides are shown in FIG. 4. The alteration T144A corresponded to sgRNA CC89, the alterations Y259C and N260D corresponded to sgRNA CC128, and the alteration M351T corresponded to sgRNA CC79. The protospacer corresponding to sgRNA CC128 was the following: 5′-AAATA₅TA₇ATAGCTGGCATCA-3′ (SEQ ID NO: 830), where the subscripts indicate the A5 and A7 nucleotides that were the targets for base editing to yield the alterations 5G and 7G, respectively, which corresponded to the CD117 amino acid alterations Y259C and N260D (FIG. 4). The amino acids Y259 and N260 of CD117 are near the binding site for stem cell factor (SCF). Table 8A below provides a summary of representative CD117 variants prepared using guides identified in the screen including the desired/target CD117 variant outcomes and the observed protein variants at maximum editing. These were selected based on favorable editing outcomes and no clear biological phenotype. Table 8A also lists observed editing rates when the cells were multiplex edited using a CD117-targeting guide in combination with a guide targeting the promoter region of HBG1/2 (sgRNA_015). Four of the guides listed in Table 8A had homology to a cynomolgus (cyno) CD117 gene. None of the guides listed in Table 8A (excepting the control knock-out (KP) guide) had an erythroid phenotype, a myeloid phenotype, or a CD117 phosphorylation phenotype. Cells edited using the guides listed in Table 8A all showed an in vivo phenotype showing major differences from control cohort in editing or human chimerism at 8 weeks. Table 8A shows that human chimerism and multi-lineage hematopoietic reconstitution potential and retention of editing at 8 was observed at levels similar to unedited controls.

TABLE 8A
Summary of ABE8.8-compatible engineered CD117 variant biology.¹

| | CD117 | | | | |
|---|---|---|---|---|---|
| | variant | | Observed protein | | |
| Variant ID | desired | Domain/Epitope | variants at max | Erythroid | Myeloid |
| (comment) | outcome | Group | editing | phenotype | phenotype |
| CC90 | E81G | other | 82% E81G | N | N |
| CC89 | T144A | other | 73% T144A; 4% | N | N |
| | | | T144A + N145D | | |
| CC119 | D45G | other | 88% D45G | N | N |
| CC128 (SCF | Y259C + | funct impt/SCF | 89% Y259C + N260D; | N | N |
| blocker) | N260D | binding | 5% N260D | | |
| CC84 | Q79R | other | 79% Q79R; 6% | N | N |
| | | | Q79R + N80D | | |
| CC79 | M351T | dimerization | 77% M351T; 5% | N | N |
| | | | M315T + Y350H | | |
| KO (splice | | | 7G edit | Y | N |
| site | | | | | |
| disruption) | | | | | |

| | CD117 | Mutliplexed | 8-week | | Low to |
|---|---|---|---|---|---|
| Variant ID | phosphorylation | with HBG1/2 - | in vivo | Cyno | no Ab |
| (comment) | phenotype | 114 sgRNA* | phenotype** | homology | binders |
| CC90 | N | ++ | N | Y | 1 |
| CC89 | N | + | N | N | 4 |
| CC119 | N | +++ | N | N | 2 |
| CC128 (SCF | N | +++ | N | Y | 4 |
| blocker) | | | | | |
| CC84 | N | + | N | Y | 2 |
| CC79 | N | +++ | N | Y | 3 |
| KO (splice | Y | N/A | Y | N/A | N/A |
| site | | | | | |
| disruption) | | | | | |

¹*For multiplexing, value is level of HBG1/2 editing that can be achieved with CD117 editing: + <40%; ++ 40-60%; +++ >60%
**in vivo phenotype in terms of major differences from control cohort in editing or human chimerism at 8 weeks

[0780] In addition to guide RNA screen, 188 human antibodies identified from a CD117 immune phage library were screened to identify six antibodies (ABTx052, ABTx062, ABTx025, ABTx030, ABTx070, and ABTx071) that bound wild type CD117 but had reduced binding to CD117 polypeptides altered using the guides identified in the guide RNA screen (e.g., CC128, CC79, and CC89) (FIG. 3). Table 8B provides a summary of the observed binding, or lack thereof, between the listed antibodies and the indicated CD117 variants prepared by editing M07e cells using the indicated guides (i.e., CC79, CC89, and CC128). M07e cells are not dependent on SCF for growth, but CD117 can be activated upon SCF stimulation. All of the antibodies listed in Table 8B bound similarly to human and cyno CD117. Cynomolgus monkey is a suitable species for investigative new drug-enabling toxicology studies. ABTx052, ABTx061, ABTx062 and ABTx025 competed with SCF to bind CD117.

TABLE 8B
CD117 antibody/edit pairs identified.

| | | | | | | | KD(M) | KD(M) |
|---|---|---|---|---|---|---|---|---|
| | | CC79- | CC89- | CC128- | SCF | ABTx052 | Human | Cyno |
| Ab ID | M07e | M07e | M07e | M07e | blocking | blocking | CD117 | CD117 |
| ABTx061 | binding | binding | binding | no | Yes | Yes | 1.86E−08 | 2.95E−08 |
| | | | | binding | | | | |
| ABTx062 | binding | binding | binding | no | Yes | Yes | 1.80E−08 | 3.18E−08 |
| | | | | binding | | | | |
| ABTx070 | binding | binding | no | binding | No | No | 6.50E−09 | 4.86E−10 |
| | | | binding | | | | | |
| ABTx071 | binding | binding | no | binding | No | No | 5.23E−10 | 4.28E−09 |
| | | | binding | | | | | |
| ABTx025 | binding | binding | binding | no | Yes | Yes | 1.25E−09 | 5.31E−09 |
| | | | | binding | | | | |
| ABTx030 | binding | low | binding | binding | No | No | 4.49E−10 | 8.30E−10 |
| | | binding | | | | | | |
| ABTx052 | binding | binding | binding | low/no | Yes | Yes | <1.0E−12 | <1.0E−12 |
| | | | | binding | | | | |

“Cyno” is an abbreviation for “cynomolgus.”

[0781] Experiments were undertaken to characterizing the binding of stem cell factor (SCF) and ABTx052 to CD117 polypeptides altered using the CC128 guide in combination with ABE8.8 (FIGS. 5A-5F and 48). It was determined that ABTx052 had negligible binding to the CD117 polypeptides altered using the CC128 guide in combination with ABE8.8. It was also determined that ABTx052 blocked SCF binding to wild type CD117.

[0782] As a quality control measure, experiments were undertaken to characterize the ABTx052 antibody (FIGS. 6A and 6B) using SDS-PAGE and size-exclusion chromatography (SEC). The results of the characterization are provided in Table 9 below.

TABLE 9
Summary of ABTx052 properties.

| Assay | Result |
|---|---|
| Purity (SDS-PAGE) | >95% |
| % monomer (SEC) | >99% |
| Yield (purified) | ~0.3 g/L transient CHO |
| Concentration | 8.68 mg/ml (PBS pH |
| (A280) | 7.2) |
| Endotoxin (LAL) | <0.1 EU/mg |

[0783] Experiments were undertaken to evaluate the binding of ABTx062 and ABTx052 to CD34+ cells edited using a base editor system containing ABE8.8 and CC128 sgRNA (FIGS. 7A and 7B). ABTx062 and ABTx052 bound cells expressing wild type CD117. The edited cells contained a 5G+7G edit (referenced to the following protospacer sequence corresponding to the CC128 sgRNA: 5′-AAATA₅TA₇ATAGCTGGCATCA-3′ (SEQ ID NO: 830)) to a CD117 polynucleotide sequence, which corresponded to the amino acid alterations Y259C and N260D. As shown in FIGS. 7A and 7B, mAbs ABTx062 and ABTx062 bound to unedited cells and showed a loss of binding to the CD34+ hematopoietic stem and progenitor cells (HSPCs) edited using gRNA CC128.

[0784] Next, experiments were undertaken to demonstrate that CD117 polypeptides containing an epitope engineered using the CC128 guide were protected against ligand blocking by ABTx052 in vitro and cells expressing the altered CD117 polypeptides had a proliferative advantage in the presence of the aBTx052 antibody relative to cells expressing a wild type CD117 polypeptide (FIGS. 8A-8G). Cell viability of primary CD34+ derived cells edited using ABE8.8 in combination with the CC128 guide and cultured in the presence of SCF at increasing concentrations of ABTx052 Ab was preserved. Long-term HSC, multi-potent progenitor, common myeloid progenitor, granulo-monocytic progenitor, and megakaryocytic-Erythrocytic progenitor subpopulations of hematopoietic stem cells were all sensitive to antibody treatment using ABTx135 (ABTx052 containing an LALADA alteration in the Fc domain) (FIGS. 51A and 51B). Viability in the absence of SCF was also preserved (FIGS. 8A and 8B). Cells expressing CD117 modified using the CC128 guide showed improved cell viability in the presence of ABTx052 relative to unedited cells (FIG. 16B). Unedited cells exposed to ABTx052 exhibit viability that resembles complete withdrawal of SCF (dotted line in FIGS. 8A and 8B). Next-generation DNA sequencing (NGS) of 1:1 mixes of unedited and edited cells demonstrated an increase in editing frequency, which demonstrated enrichment of cells harboring the target CD117 edit (5G+7G; Y259C+N260D) (FIGS. 8D and 8F). FIGS. 8D and 8E show that contacting cells expressing a wild type CD117 polypeptide (“unedited cells”) with ABTx052 mimicked complete SCF withdrawal and led to ˜85% loss of viability in vitro, while edited cells showed increased viability relative to the unedited cells. Therefore, the edited cells maintained viability upon exposure to ABTx052.

[0785] An in vivo study was undertaken in mice to evaluate engraftment and function of cells expressing a CD117 polypeptide edited using the CC128 guide in combination with ABE8.8. The experimental design is described in Table 10 and in FIG. 9. The CD117 variants evaluated are described in Table 12. Engineered hematopoietic stem cells were transfected with the guide and mRNA encoding ABE8.8 using electroporation. Engraftment of the CD117 variant cells in NBSGW mice was not altered by the base editing, as shown in FIGS. 10A, 10B, 20A-20H, 35A, and 35B, where engraftment of the edited cells was found to be approximately the same as or greater than that of unedited cells across cellular compartments. Comparable multi-lineage reconstitution was observed for unedited and CD117-edited CD34+ cells (FIG. 35A). High editing retention was observed for the CD117-edited cells within different bone marrow hematopoietic compartments indicating long-term persistence of CD117 editing (FIG. 35B). As demonstrated in Table 11, differentiation potential of the cells was not altered by the base editing carried out to alter the CD117 polypeptide sequence. Methods for differentiation of CD34+ cells are described in Giarratana M C et al. Proof of principle for transfusion of in vitro-generated red blood cells. Blood. 2011 Nov. 10; 118 (19): 5071-9. doi: 10.1182/blood-2011-06-362038. Epub 2011 Sep. 1. PubMed PMID: 21885599; PubMed Central PMCID: PMC3217398. Also, as shown in FIGS. 11A and 11B, editing of the CD117 polynucleotide was retained in bulk bone marrow (BM) at the 8-week timepoint.

TABLE 10
Experimental design.

| | Treatment | | | |
|---|---|---|---|---|
| | (guides | | | |
| | used to | | | |
| | edit the | | | N for each |
| Group | cells) | Dose (cells/mouse) | Route | timepoint |
| 1 | Unedited | 3.00E+05 | IV | 8-wk: 3 |
| | | | | 16-wk: 5 |
| 2 | CC79 | 3.00E+05 | IV | 8-wk: 3 |
| | | | | 16-wk: 5 |
| 3 | CC84 | 3.00E+05 | IV | 8-wk: 3 |
| | | | | 16-wk: 5 |
| 4 | CC89 | 3.00E+05 | IV | 8-wk: 3 |
| | | | | 16-wk: 5 |
| 5 | CC90 | 3.00E+05 | IV | 8-wk: 3 |
| | | | | 16-wk: 5 |
| 6 | CC119 | 3.00E+05 | IV | 8-wk: 3 |
| | | | | 16-wk: 5 |
| 7 | CC128 | 3.00E+05 | IV | 8-wk: 3 |
| | | | | 16-wk: 5 |
| 8 | CC291 KO | 3.00E+05 | IV | 8-wk: 3 |
| | | | | 16-wk: 5 |

“IV” is an abbreviation for intravenous.

TABLE 11
BT-499 8-week engraftment.

Average frequencies of cell populations in
BM (% hCD45+)

| Group | Lin- | hCD235a+ | hCD15+ | hCD19+ |
|---|---|---|---|---|
| (variant) | hCD34+ | (erythroid) | (myeloid) | (B cell) |
| Untreated | 2.1 | 11.9 | 16.9 | 77.3 |
| CC79 | 4.5 | 12.5 | 22.4 | 66.1 |
| CC84 | 2.4 | 22.8 | 22.8 | 71.5 |
| CC89 | 2.1 | 15.2 | 20.1 | 73.1 |
| CC90 | 3.9 | 20.8 | 22 | 69.3 |
| CC119 | 2.7 | 16.3 | 19.5 | 74.4 |
| CC128 | 2.5 | 6 | 17.1 | 76.2 |
| 291KO | 2.6 | 5.2 | 20.7 | 72.3 |

TABLE 12
Variant edits, where the location of each edit is indicated
with referenced to the distance of the nucleotide from the
5′ end of the corresponding spacer sequence (see Table 1).

| Variant | Intended | | | | |
|---|---|---|---|---|---|
| ID | variant | 5G | 6G | 7G | 8G |
| CC79 | M351T | | M351T | | Y350Y |
| CC84 | Q79R | | Q79R | | N80D |
| CC89 | T144A | T144A | | | N145D |
| CC90 | E81G | | E81G | E81G | |
| CC119 | D45G | D45G | | | |
| CC128 | Y259C/N260D | Y259C | | N260D | |

[0786] Next, primary CD34+ hematopoietic stem and progenitor cells (HSPCs) were base edited in multiplex using ABE8.8 in combination with sgRNA CC128 and sgRNA_015 (HBG1/2-114 edit) (FIGS. 12, 13A, and 13B). Multiplex editing with sgRNA HBG1/2a-114 and gRNA CC128 yielded highly efficient base editing (>80% and ˜70%, respectively) (FIGS. 13A and 13B). An additional ˜15% editing of 5G alone (CD117 Y259C) was also detected. Over 60% gamma induction was detected for in vitro erythroid differentiated (IVED) cells that were multiplex edited (similar to those achieved single-plex sgRNA_015 editing alone). Further, as shown in FIG. 29A, multiplex (>85% or >75%) editing efficiencies were equivalent to those for non-multiplex edits. The outcomes for editing of the CD117 polynucleotide were favorable: >87% bi-allelic, 1.5% mono-allelic, and 1.5% unedited. Multiplex editing did not hinder gamma globulin induction and was associated with >55% gamma-globin induction (FIG. 29B). The multiplex edited cells escaped recognition by mAb-7 (FIG. 29C). Over 60% of gamma globin induction was detected in in vitro differentiated erythroid cells edited in multiplex, which was similar to levels with a single-plex HBG1/2 edit. In some cases, about 80% bi-allelic CD117 editing was observed and near complete editing of the HBG1/2 locus in HSCs. It was confirmed that multiplex editing was achieved in the cells by confirming that cells containing the HBG1/2-114 edit also contained an altered CD117 polynucleotide.

[0787] Experiments were next undertaken to demonstrate that c-KIT/CD117 polypeptides edited using the CC128 guide were functional in vitro. Given the about 15% occurrence of the 5G edit alone (CD117 Y259C) in cells edited using the CC128 guide, these CD117 variants were individually investigated for normal functionality in addition to the 5G+7G combined edit (CD117 Y259C+N260D). The experimental design for generating single cell clones for de-risking individual edits introduced using the CC128 guide used in combination with ABE8.8 is illustrated in FIG. 14. Wild type MO7e cells were nucleofected with mRNA encoding ABE8.8 and the CC128 guide polynucleotide. Transfected cells were then cultured in bulk and sorted to isolate cells containing individual edits to the CD117 polynucleotide. Clones that were isolated and evaluated are described in Table 13. Allelic editing measured for each clone is shown in FIG. 15A. ABTx052 binding to each clone was measured and many of the clones showed reduced binding relative to wild type cells expressing an unedited CD117 polypeptide (FIG. 15B). ABTx052 (alternatively referred to as “mAb-7”), bound CD117 with high affinity, did not bind to the edited CD117 variant prepared using the guide CC128 as purified protein or expressed in M07e cells, and blocked SCF binding to wild type CD117. The KD(M) of ABTx052 (mAB-7) for human CD117 was <1.0E-12 and the KD(M) of ABTx052 for cyno CD117 was <1.0E-12. Phosphorylation of CD117 expressed by the clones P3H2, P1G6, P1C10, and CC128 was measured in the presence of SCF and/or ABTx052 (FIGS. 16A-16D). Wild type CD117 was also phosphorylated, and no phosphorylation of CD117 was measured in cells with knock-out edits to the CD117 polynucleotide sequence (FIG. 24). Therefore, the c-KIT/CD117 polypeptides using the CC128 guide were functional.

TABLE 13
M07e single clones.

| | |
|---|---|
| Clone | |
| Name | Allelic Editing Composition |

| | | |
|---|---|---|
| P1F12 | 5G + 7G | Biallelic |
| P1F5 | 5G + 7G | Biallelic |
| P1F10 | 5G + 7G | Biallelic |
| P3H2 | 5G + 7G | Monoallelic |
| P1G6 | 5G | Biallelic |
| P1C10 | 5G | Biallelic |
| P4G9 | 5G + 7G + 10G | |
| P3A4 | 5G + 7G | Monoallelic |
| P2B4 | 5G + 7G/7G | Monoallelic |
| WT | N/A | N/A |
| CC128 | 5G + 7G | Biallelic |
| CC295 | cKIT Knockout | Biallelic |

[0788] Further experiments were undertaken to determine that altered CD117/c-KIT receptors reflected the life cycle of the CD117 receptor. Editing efficiencies corresponding to guides for altering a CD117 polynucleotide are shown in FIG. 23A. Target edits carried out using the guides are described in Table 14. The lifecycle of the CD117 receptor includes ligand binding, dimerization, trans-phosphorylation at the juxta membrane region, phosphorylation in the intracellular kinase domain, ubiquitination, internalization, and proteolytic degradation. The following assays were completed to evaluate receptor biology: phosphorylation and internalization assays. The following hematopoietic stem cell (HSC) assays were also completed: colony forming units (CFU) (FIG. 21A), in vitro differentiation (IVD) (FIG. 22C), myeloid (FIG. 22D), and in vivo multilineage reconstitution. Mast cell activation was also evaluated. As discussed above, the altered CD117 polypeptides were phosphorylated in the presence of SCF. It was also determined that CD117 expressed by cells edited using the guide CC128 was internalized by the cells upon binding to SCF (FIGS. 25 and 49). Highly efficient, bi-allelic editing was achieved in CD34+ cells to yield variants having normal colony forming unit capacity (FIGS. 21A and 21B). Disrupting CD117 function through knock-out impacted the colony forming ability of the erythroid population. Over 85% bi-allelic editing was achieved using the guides CC79, CC128, CC84, CC90, CC89, and CC119 (FIG. 21B). CD117 knockout profoundly affected erythroid in vitro differentiation (FIGS. 22A-22D and 23B), but edits carried out using the guides 78, 79, 84, 89, 90, 119, and 128 did not (FIG. 23B). CFU assays indicated that editing CD117 had minimal effect on myeloid colony formation (FIG. 21A). Therefore, the CD117 mutations carried out using the guides CC78, CC79, CC84, CC89, CC90, CC119, CC128, and CC84+CC90 did not disrupt HSPC function and differentiation (e.g., into myeloid or erythroid lineages) (see, e.g., FIGS. 50A and 50B).

TABLE 14
Mutations corresponding to guides.

| Guide | Mutation/edits |
|---|---|
| CC78 | Y418C |
| CC79 | M351T |
| CC84 | Q79R |
| CC90 | E81G |
| CC89 | T144A |
| CC119 | D45G |
| CC128 | Y259C + N260D |
| 291 | A to G at splice site |
| | (KO) |
| 295 | A to G at splice site |
| | (KO) |

[0789] Experiments were undertaken to demonstrate that CD34+ hematopoietic stem cells edited using ABE8.8 in combination with the guide CC128 were enriched in a mixed culture containing the base edited and unedited cells when grown in the presence of ABTx052 (alternatively referred to as mAb-7) (FIG. 30). A 1:1 mixture of unedited and edited cells was plated in semi-solid media in the presence of varying concentrations of ABTx052. At day 14, individual erythroid colonies (BFU-E) were picked and sequenced (24 total for each concentration of ABTx052). Stem cell factor (SCF) blocking by ABTx052 significantly inhibited erythroid colony formation by unedited cells. In the absence of ABTx052, an even distribution of edited and unedited colonies was observed. Increasing concentration of ABTx052 yielded a correspondingly higher proportion of edited colonies. 100% of colonies at ABTx052 concentration 100 ng/ml or higher contained a 5G or 5G_7G edit. Very few BFU-E colonies were observed when the cells were incubated with the antibody SR1 as a positive control, which blocks SCF binding to CD117 in both edited and unedited cells. Treatment of unedited HSPCs with mAB-7 in vitro resulted in a >85% reduction in viability of the cells, while CD117-edited cells remained unaffected.

[0790] Experiments were undertaken to demonstrate through xenotransplantation studies that CD117-edited HSPC were capable of multi-lineage hematopoietic engraftment in immunocompromised mice as shown in FIG. 36A. To evaluate anti-CD117-mAb-mediated myeloablation, NSG mice were first humanized with either unedited cells or a 1:1 mixture of unedited and multiplex edited (i.e., cells containing an altered CD117 gene and an altered HBG1/2 gene; 1e6 cells/mouse) human CD34+ cells. 4 weeks post-transplantation, mice were either left untreated, or treated with either isotype control antibody or mAb-7 according to the following mouse groups: A) unedited cells and no antibody treatment; B) unedited cells and treatment with a control isotype antibody; C) unedited cells and treatment with mAb-7; D) 1:1 ratio of edited and unedited cells and treatment with the control isotype antibody; E) 1:1 ratio of edited and unedited cells and treatment with mAb-7. Mouse bone marrow was harvested at 8 and 12 weeks post mAb treatment administration and was analyzed using flow cytometry (to measure overall CD45+ human chimerism or CD34+ cell frequency) (FIGS. 36B and 36C). Bulk bone marrow and sorted CD34+ cells were analyzed using NGS to evaluate editing retention (FIG. 36D). It was found that mAb-7 selectively depleted unedited cells form the bone marrow (BM) of mice transplanted with hCD34+ cells. Significant ablation of human chimerism was observed in mAb-7 treated mice transplanted with unedited CD34+ cells. The mAb-7 treatment led to in vivo selection of multiplex edited cells, as indicated by high levels of CD117 and HBG1/2 editing in antibody-treated mouse bone marrow.

[0791] A further in vivo experiment was undertaken (see FIG. 37) to evaluate ABTx052-mediated enrichment of multiplex edited cells in NSG mice. Table 15 below describes what cells the mice were administered and the number of mice evaluated at each time point listed. The following was evaluated at each time point: chimerism, HSC phenotyping, base edits observed in bulk bone marrow (BM) and Lin−CD34+, and CD117 staining. At 12 weeks post-antibody dosing, a globin analysis was completed for each mouse. Engraftment of the cells in the mice was measured as CD45+ cell chimerism, and it was observed that unedited cells were depleted in the mice following administration of ABTx052 (FIG. 38). Selective depletion of CD34+ stem cells was observed in mice engrafted with unedited HSCs and exposed to ABTx052 post-engraftment (FIG. 39), as demonstrated by ABTx052 treatment impacting CD34+ cell frequency within bone marrow of transplanted mice. Eight weeks post ABTx052 administration, sequencing of bulk bone marrow and lin-CD34+ cells revealed enrichment of cells containing a base-edited CD117 polynucleotide (FIGS. 40A and 40B). Increased levels of HBG1/2 and CD117 editing was measured in bulk BM and Lin−CD34+ populations of mice treated with ABTx052. Multiplex edited HSCs were retained in vivo.

TABLE 15
Treatment groups and number of mice evaluated at each indicated end point (TD).

| Group/Study | Cells | Ab | TD | TD | TD | TD | TD |
|---|---|---|---|---|---|---|---|
| Condition | (1e6/mouse) | treatment | (0 wk) | (2 wk) | (4 wk) | (8 wk) | (12 wk) |
| 1 | 1:1 ratio of | None | N = 3 | | | | |
| | unedited to | | | | | | |
| | multiplex | | | | | | |
| | edited cells | | | | | | |
| 2 | Unedited cells | None | N = 3 | N = 3 | N = 3 | N = 3 | N = 3 |
| 3 | Unedited cells | Isotype | | N = 3 | N = 3 | N = 3 | N = 3 |
| 4 | Unedited cells | ABTx052 | | N = 5 | N = 5 | N = 5 | N = 5 |
| 5 | 1:1 ratio of | Isotype | | N = 3 | N = 3 | N = 3 | N = 3 |
| | unedited cells | | | | | | |
| | to multiplex | | | | | | |
| | edited cells | | | | | | |
| 6 | 1:1 ratio of | ABTx052 | | N = 5 | N = 5 | N = 5 | N = 5 |
| | unedited cells | | | | | | |
| | to cells edited | | | | | | |
| | to alter a | | | | | | |
| | CD117 gene | | | | | | |
| | but not an | | | | | | |
| | HBG1/2 gene | | | | | | |
| 7 | 1:1 ratio of | ABTx052 | | N = 5 | N = 5 | N = 5 | N = 5 |
| | unedited cells | | | | | | |
| | to multiplex | | | | | | |
| | edited cells | | | | | | |
| 8 | 1:1 ratio of | None | | | | | N = 5 |
| | unedited to | | | | | | |
| | multiplex | | | | | | |
| | edited cells | | | | | | |

[0792] The above experiments demonstrate that the mAb-7 bound wild-type CD117 with high affinity but minimally to base edited CD117 variant protein. The also demonstrate that edited CD117 behaved normally in vitro vs wild-type in proliferation, differentiation, viability, and phosphorylation assays. Further, they demonstrate that CD117 base-edited CD34+ cells lead to multilineage reconstitution in rodent model comparable with unedited CD34+ cells. Also, Fc engineered mAb-7 did not induce mast-cell degranulation in vitro, and multiplex editing of cells using a CD117 sgRNA with therapeutic sgRNAs (e.g., HBG1/2) with a single ABE8 editor achieved >85% CD117 base editing in CD34+ cells also containing therapeutic edit. Further, Multiplex base edited CD34+ cells evaded mAb-mediated effects and SCF-ligand blocking, allowing for escape in vitro and in vivo. Finally, the mAb-7 selectively depleted unedited cells from the BM of mice transplanted with a 1:1 mixture of unedited and edited hCD34+ cells.

### Example 2: Development of an Engineered Stem Cell Antibody-Paired Evasion (ESCAPE) Approach for Engraftment of Hematopoietic Stem Cells (HSCs) Engineered to Express the Makassar Variant of Beta Hemoglobin

[0793] To develop an engineered stem cell antibody-paired evasion (ESCAPE) approach for engraftment of HSCs engineered to express a Makassar variant of beta hemoglobin, a set of 102 candidate guides were screened (FIG. 17). The guides were screen using the base editor ABE8.20-NRCH (see Table 16 below). The criteria for selection from guide screening in HEK293T cells were the following: 1) intending edit was achieved at a frequency >25% of good next-generation DNA sequencing (NGS) quality, 2) low heterogeneity in final protein variant generated, and 3) conservation of protein sequence at the target site and/or amino acid residue between cynomolgus genome and human genome (required at amino acid residue being targeted; preferred if 100% conserved). The guides were also screened in CD34+ hematopoietic stem cells (HSCs). Guides identified in the screen and their corresponding edits and maximum editing efficiencies are listed in Table 16. Expression of CD117 in cells edited using the gRNA931 guide (CC200) was at levels comparable to CD117 expression levels in unedited cells (FIG. 18A). Cells edited using gRNA931 lacked binding to ABTx052 (FIG. 18B).

[0794] Cells that were base edited using gRNA931 in combination with ABE8.20-NRCH resulted in predominantly the following CD117 variants: S261G; N260D+S261G (˜15%); N260G+S261G (˜3%); and N260S+S261G (˜4%). CD117 variants containing N260S or N260D alterations also contained an S261G alteration, and the combined alterations N260S+S261G or N260D+S261G were observed in a small number of CD117 variants detected (less than 10%).

TABLE 16
Edits corresponding to gRNA samples.

| | Dominant edit of | |
|---|---|---|
| Sample | interest (max %) | Notes |
| gRNA889 | L472P (79.27%) | |
| gRNA908 | S279P (57.6%) | |
| gRNA918 | V64A (56.79%) | |
| gRNA923 | Silent | Near SCF |
| | | binding domain? |
| gRNA928 | S251G (85.17%) | |
| gRNA929 | Silent | Similar to CC128 |
| gRNA931 | S261G (56.06%) | Does not bind to |
| (CC200) | | ABTx052 |
| gRNA944 | Silent | |

[0795] Cells expressing CD117 variants prepared using the gRNA931 guide showed increased viability relative to unedited cells when grown in the presence of ABTx052 at increasing concentrations (FIG. 19). The CD117 S261G engineered epitope was protective against ligand blocking by ABTx052 in vitro. Viability of the edited cells was not affected by addition of ABTx052 at any concentration at the day 4 time point. The viability of unedited cells reached the viability levels of cells cultured without any SCF.

[0796] Experiments were undertaking to evaluate the efficiency of base editing of hematopoietic stem cells containing a Sickle Cell Disease mutation (E6V) in the beta hemoglobin gene (HbSS CD34s). The following base editor systems (see FIG. 26) were used: An Inlaid Base Editor (IBE) in combination with sgRNA_017; ABE8.20-NRCH in combination with sgRNA_027; and ABE8.20+ in combination with sgRNA_027. The term “NRCH” refers to the PAM recognized by the Cas9 variant within the indicated base editor, where N represents A, C, G, or T, R represents A or G, and H represents A, C, or T. The amino acid and/or nucleotide sequences for ABE8.20-NRCH, ABE8.20+, and the Inlaid Base Editor (IBE) referenced in FIG. 26 are provided in Table 17 below. The ABE8.20-NRCH base editor contained a TadA*8.20 deaminase domain, the ABE9v1-NRCH base editor contained a TadA*8.20 deaminase domain with the amino acid alteration S82T, and the ABE9v2 base editor contained a TadA*8.20 deaminase domain with the amino acid alterations S82T, Y147D, T166I, and D167N. As shown in FIG. 26, it was found that Makassar editing (i.e., installing the Makassar edit or the Ser9Pro bystander and other non-synonymous bystanders within the target window on the beta globin gene) was achieved at the beta globin locus in the CD34+ cells grown in XVIVO medium (serum-free stem cell medium) 5 days (i.e., “d5”) post electroporation (EP) and 7 days (i.e., “d7”) in in vitro differentiated erythroid cultures (IVD).

TABLE 17
Base editor sequences. In the amino acid sequences, adenosine deaminase
domains are in plain text, linkers are in italics, nucleic acid programmable DNA
binding protein (e.g., Cas9-NRCH or Cas9-MQKFRAER*) domains are in bold, and
bipartite nuclear localization signals are underlined. The Cas9-NRCH domains
recognized the PAM sequence CACC. In embodiments, the ABE8.20-NRCH and
ABE8.20+-NRCH base editors avoid introducing a Ser9Pro bystander edit to a beta
globin gene sequence.

| Editor | Amino Acid or Nucleotide Sequence |
|---|---|
| ABE8.20 | MSEVEFSHEYWMRHALTLAKRARDEREVPVGAVLVLNNRVIGEGWNRAIGLHDPTAH |
| (F149Y)- | AEIMALRQGGLVMQNYRLYDATLYSTFEPCVMCAGAMIHSRIGRVVFGVRNAKTGAA |
| NRCH | GSLMDVLHHPGMNHRVEITEGILADECAALLCRFYRMPRRVFNAQKKAQSSTDSGGS |
| | SGGSSGSETPGTSESATPESSGGSSGGSDKKYSIGLAIGTNSVGWAVITDEYKVPSK |
| | KFKVLGNTDRHSIKKNLIGALLFDSGETAEATRLKRTARRRYTRRKNRICYLQEIFS |
| | NEMAKVDDSFFHRLEESFLVEEDKKHERHPIFGNIVDEVAYHEKYPTIYHLRKKLVD |
| | STDKADLRLIYLALAHMIKFRGHFLIEGDLNPDNSDVDKLFIQLVQTYNQLFEENPI |
| | NASGVDAKAILSARLSKSRRLENLIAQLPGEKKNGLFGNLIALSLGLTPNFKSNFDL |
| | AEDAKLQLSKDTYDDDLDNLLAQIGDQYADLFLAAKNLSDAILLSDILRVNTEITKA |
| | PLSASMVKRYDEHHQDLTLLKALVRQQLPEKYKEIFFDQSKNGYAGYIDGGASQEEF |
| | YKFIKPILEKMDGTEELLVKLNREDLLRKQRTFDNGIIPHQIHLGELHAILRRQGDF |
| | YPFLKDNREKIEKILTFRIPYYVGPLARGNSRFAWMTRKSEETITPWNFEEVVDKGA |
| | SAQSFIERMTNFDKNLPNEKVLPKHSLLYEYFTVYNELTKVKYVTEGMRKPAFLSGE |
| | QKKAIVDLLFKTNRKVTVKQLKEDYFKKIECFDSVEISGVEDRFNASLGTYHDLLKI |
| | IKDKDFLDNEENEDILEDIVLTLTLFEDREMIEERLKTYAHLFDDKVMKQLKRLRYT |
| | GWGRLSRKLINGIRDKQSGKTILDFLKSDGFANRNFMQLIHDDSLTFKEDIQKAQVS |
| | GQGDSLHEHIANLAGSPAIKKGILQTVKVVDELVKVMGGHKPENIVIEMARENQTTQ |
| | KGQKNSRERMKRIEEGIKELGSQILKEHPVENTQLQNEKLYLYYLQNGRDMYVDQEL |
| | DINRLSDYDVDHIVPQSFLKDDSIDNKVLTRSDKNRGKSDNVPSEEVVKKMKNYWRQ |
| | LLNAKLITQRKFDNLTKAERGGLSELDKAGFIKRQLVETRQITKHVAQILDSRMNTK |
| | YDENDKLIREVKVITLKSKLVSDFRKDFQFYKVREINNYHHAHDAYLNAVVGTALIK |
| | KYPKLESEFVYGDYKVYDVRKMIAKSEQEIGKATAKYFFYSNIMNFFKTEITLANGE |
| | IRKRPLIETNGETGEIVWDKGRDFATVRKVLSMPQVNIVKKTEVQTGGFSKESILPK |
| | GNSDKLIARKKDWDPKKYGGFNSPTVAYSVLVVAKVEKGKSKKLKSVKELLGITIME |
| | RSSFEKNPIDFLEAKGYKEVKKDLIIKLPKYSLFELENGRKRMLASAGVLQKGNELA |
| | LPSKYVNFLYLASHYEKLKGSPEDNEQKQLFVEQHKHYLDEIIEQISEFSKRVILAD |
| | ANLDKVLSAYNKHRDKPIREQAENIIHLFTLTNLGAPAAFKYFDTTINRKQYNTTKE |
| | VLDATLIRQSITGLYETRIDLSQLGGDEGADKRTADGSEFESPKKKRKV (SEQ ID |
| | NO: 929) |
| ABE8.20 | TAATACGACTCACTATAAGGAAATAAGAGAGAAAAGAAGAGTAAGAAGAAATATAAG |
| (F149Y)- | AGCCACCATGTCCGAAGTCGAGTTTTCCCATGAGTACTGGATGAGACACGCATTGAC |
| NRCH | TCTCGCAAAGAGGGCTCGAGATGAACGCGAGGTGCCCGTGGGGGCAGTACTCGTGCT |
| | CAACAATCGCGTAATCGGCGAAGGTTGGAATAGGGCAATCGGACTCCACGACCCCAC |
| | TGCACATGCGGAAATCATGGCCCTTCGACAGGGAGGGCTTGTGATGCAGAATTATCG |
| | ACTTTATGATGCGACGCTGTACTCGACGTTTGAACCTTGCGTAATGTGCGCGGGAGC |
| | TATGATTCACTCCCGCATTGGACGAGTTGTATTCGGTGTTCGCAACGCCAAGACGGG |
| | TGCCGCAGGTTCACTGATGGACGTGCTGCATCATCCAGGCATGAACCACCGGGTAGA |
| | AATCACAGAAGGCATATTGGCGGACGAATGTGCGGCGCTGTTGTGTCGTTTTTATCG |
| | CATGCCCAGGCGTGTCTTTAACGCCCAGAAAAAAGCACAATCCTCTACTGACTCCGG |
| | CGGAAGCAGCGGAGGATCTTCTGGAAGCGAAACCCCAGGCACCAGCGAGTCTGCCAC |
| | ACCAGAATCATCTGGCGGTAGCTCCGGCGGCAGCGACAAGAAGTATTCTATCGGACT |
| | GGCCATCGGCACCAACTCTGTTGGATGGGCCGTGATCACCGACGAGTACAAGGTGCC |
| | CAGCAAGAAATTCAAGGTGCTGGGCAACACCGACAGGCACAGCATCAAGAAGAACCT |
| | GATCGGCGCACTGCTGTTCGACTCTGGCGAAACAGCCGAGGCCACCAGACTGAAGAG |
| | AACAGCCCGCAGACGGTACACCAGAAGAAAGAACCGGATCTGCTACCTCCAAGAGAT |
| | CTTCAGCAACGAGATGGCCAAGGTGGACGACAGCTTCTTCCACAGACTGGAAGAGTC |
| | CTTCCTGGTGGAAGAGGACAAGAAGCACGAGAGACACCCCATCTTCGGCAACATCGT |
| | GGACGAGGTGGCCTACCACGAGAAGTACCCCACCATCTACCACCTGAGAAAGAAACT |
| | GGTGGACAGCACCGACAAGGCCGACCTGAGACTGATCTATCTGGCCCTGGCTCACAT |
| | GATCAAGTTCCGGGGCCACTTCCTGATCGAGGGCGACCTGAATCCTGACAACAGCGA |
| | CGTGGACAAGCTGTTCATCCAGCTGGTGCAGACCTACAACCAGCTGTTCGAGGAAAA |
| | CCCCATCAACGCCAGCGGAGTGGATGCCAAGGCCATCCTGTCTGCCAGACTGAGCAA |
| | GAGCAGACGGCTGGAAAATCTGATCGCCCAGCTGCCTGGCGAGAAGAAGAATGGCCT |
| | GTTCGGCAACCTGATTGCCCTGAGCCTGGGCCTGACACCTAACTTCAAGAGCAACTT |
| | CGACCTGGCCGAGGACGCCAAACTGCAGCTGAGCAAGGACACCTACGACGACGACCT |
| | GGACAATCTGCTGGCCCAGATCGGCGATCAGTACGCCGACTTGTTTCTGGCCGCCAA |
| | GAATCTGAGCGACGCCATCCTGCTGTCCGACATCCTGAGAGTGAACACCGAGATCAC |
| | CAAGGCACCTCTGAGCGCCTCTATGGTCAAGAGATACGACGAGCACCACCAGGATCT |
| | GACCCTGCTGAAGGCCCTCGTTAGACAGCAGCTGCCAGAGAAGTACAAAGAGATTTT |
| | CTTCGACCAGAGCAAGAACGGCTACGCCGGCTACATTGATGGCGGAGCCAGCCAAGA |
| | GGAATTCTACAAGTTCATCAAGCCCATCCTCGAGAAGATGGACGGCACCGAGGAACT |
| | GCTGGTCAAGCTGAACAGAGAGGACCTGCTGAGAAAGCAGAGAACCTTCGACAACGG |
| | CATCATCCCTCACCAGATCCACCTGGGAGAACTGCACGCCATTCTGCGGAGACAAGG |
| | GGACTTTTACCCATTCCTGAAGGACAACCGGGAAAAGATCGAGAAAATCCTGACCTT |
| | CAGGATCCCCTACTACGTGGGACCACTGGCCAGAGGCAATAGCAGATTCGCCTGGAT |
| | GACCAGAAAGAGCGAGGAAACCATCACTCCCTGGAACTTCGAGGAAGTGGTGGACAA |
| | GGGCGCCAGCGCTCAGTCCTTCATCGAGCGGATGACCAACTTCGATAAGAACCTGCC |
| | TAACGAGAAGGTGCTGCCCAAGCACAGCCTGCTGTACGAGTACTTCACCGTGTACAA |
| | CGAGCTGACCAAAGTGAAATACGTGACCGAGGGAATGAGAAAGCCCGCCTTTCTGAG |
| | CGGCGAGCAGAAAAAGGCCATCGTGGATCTGCTGTTCAAGACCAACCGGAAAGTGAC |
| | CGTGAAGCAGCTGAAAGAGGACTACTTCAAGAAAATCGAGTGCTTCGACAGCGTCGA |
| | GATCTCCGGCGTGGAAGATCGGTTCAATGCCAGCCTGGGCACATACCACGATCTGCT |
| | GAAAATTATCAAGGACAAGGACTTCCTGGACAACGAAGAGAACGAGGACATCCTTGA |
| | GGACATCGTGCTGACACTGACCCTGTTTGAGGACAGAGAGATGATCGAGGAACGGCT |
| | GAAAACATACGCCCACCTGTTCGACGACAAAGTGATGAAGCAACTGAAGCGGCTGAG |
| | ATACACCGGCTGGGGCAGACTGTCTCGGAAGCTGATCAACGGCATCCGGGATAAGCA |
| | GTCCGGCAAGACCATCCTGGACTTTCTGAAGTCCGACGGCTTCGCCAACAGAAACTT |
| | CATGCAGCTGATTCACGACGACAGCCTCACCTTCAAAGAGGATATCCAGAAAGCCCA |
| | GGTGTCCGGCCAGGGCGATTCTCTGCATGAGCACATTGCCAACCTGGCCGGCTCTCC |
| | CGCCATTAAGAAAGGCATCCTGCAGACAGTGAAGGTGGTGGACGAGCTTGTGAAAGT |
| | GATGGGCGGACACAAGCCCGAGAACATCGTGATCGAAATGGCCAGAGAGAACCAGAC |
| | CACACAGAAGGGACAGAAGAACAGCCGCGAGAGAATGAAGCGGATCGAAGAGGGCAT |
| | CAAAGAGCTGGGCAGCCAGATCCTGAAAGAACACCCCGTGGAAAACACCCAGCTGCA |
| | GAACGAGAAGCTGTACCTGTACTACCTGCAGAATGGACGGGATATGTACGTGGACCA |
| | AGAGCTGGACATCAACAGACTGTCCGACTACGATGTGGACCATATCGTGCCCCAGTC |
| | TTTTCTGAAGGACGACTCCATCGACAACAAGGTCCTGACCAGATCCGACAAGAATCG |
| | GGGCAAGAGCGACAACGTGCCCTCCGAAGAGGTGGTCAAGAAGATGAAGAACTACTG |
| | GCGACAGCTGCTGAACGCCAAGCTGATTACCCAGCGGAAGTTCGACAATCTGACCAA |
| | GGCCGAAAGAGGCGGCCTGAGCGAACTGGATAAGGCCGGCTTCATCAAGAGACAGCT |
| | GGTGGAAACCCGGCAGATCACAAAGCACGTGGCACAGATTCTGGACTCTCGGATGAA |
| | CACTAAGTACGACGAGAACGACAAACTGATCCGCGAAGTGAAAGTCATCACCCTGAA |
| | GTCCAAGCTGGTGTCCGATTTCCGGAAGGATTTCCAGTTCTACAAAGTGCGCGAGAT |
| | CAACAACTACCATCACGCCCACGACGCCTACCTGAATGCCGTTGTTGGAACAGCCCT |
| | GATCAAAAAGTACCCTAAGCTGGAAAGCGAGTTCGTGTACGGCGACTACAAGGTGTA |
| | CGACGTGCGGAAGATGATCGCCAAGAGCGAGCAAGAGATTGGCAAGGCAACCGCCAA |
| | GTACTTCTTCTACAGCAACATCATGAACTTTTTCAAGACAGAGATCACCCTCGCCAA |
| | CGGCGAGATCAGAAAGCGGCCTCTGATCGAGACAAACGGCGAAACCGGCGAGATTGT |
| | GTGGGATAAGGGCAGAGACTTTGCCACAGTGCGGAAAGTGCTGAGCATGCCCCAAGT |
| | GAATATCGTGAAGAAAACCGAGGTGCAGACAGGCGGCTTCAGCAAAGAGTCTATCCT |
| | GCCTAAGGGGAACTCCGACAAGCTGATCGCCAGAAAGAAGGACTGGGACCCCAAGAA |
| | ATACGGCGGCTTTAACTCTCCCACCGTGGCCTATTCTGTTCTGGTGGTGGCCAAAGT |
| | GGAAAAGGGCAAGTCCAAGAAACTCAAGAGCGTGAAAGAGCTGCTGGGGATCACCAT |
| | CATGGAAAGAAGCAGCTTCGAGAAGAATCCGATCGATTTCCTCGAGGCCAAGGGTTA |
| | CAAAGAAGTGAAAAAGGACCTGATCATCAAGCTCCCCAAGTACTCCCTGTTCGAGCT |
| | GGAAAACGGCCGGAAGAGAATGCTGGCCTCTGCCGGTGTCCTGCAGAAGGGAAACGA |
| | ACTGGCCCTGCCTAGCAAATATGTGAACTTCCTGTACCTGGCCAGCCACTATGAGAA |
| | GCTGAAGGGCAGCCCCGAGGACAATGAGCAAAAGCAGCTGTTTGTGGAACAGCACAA |
| | GCACTACCTGGACGAGATCATCGAGCAGATCAGCGAGTTTAGCAAGAGAGTGATTCT |
| | GGCCGACGCCAATCTGGACAAAGTGCTGTCCGCCTACAACAAGCACCGGGACAAGCC |
| | TATCAGAGAGCAGGCCGAGAATATCATCCACCTGTTTACCCTGACCAACCTGGGAGC |
| | CCCTGCGGCCTTCAAGTACTTTGACACCACCATCAACAGGAAGCAGTACAACACCAC |
| | CAAAGAGGTGCTGGACGCCACTCTGATCCGCCAGTCTATCACCGGCCTGTACGAGAC |
| | ACGGATCGACCTGTCTCAACTCGGAGGCGACGAAGGCGCCGATAAGAGAACCGCCGA |
| | TGGCTCTGAGTTCGAGAGCCCTAAGAAAAAGCGCAAAGTGTAG (SEQ ID NO: 930) |
| ABE8.20+ | MSEVEFSHEYWMRHALTLAKRARDEREVPVGAVLVLNNRVIGEGWNRAIGLHDPTAH |
| (ABE8.20 | AEIMALRQGGLVMQNYRLYDATLYSTFEPCVMCAGAMIHSRIGRVVFGVRNAKTGAA |
| w/ the | GSLMDVLHHPGMNHRVEITEGILADECAALLCDFYRMPRRVFNAQKKAQSSINSGGS |
| alterations | SGGSSGSETPGTSESATPESSGGSSGGSDKKYSIGLAIGTNSVGWAVITDEYKVPSK |
| R147D, | KFKVLGNTDRHSIKKNLIGALLFDSGETAEATRLKRTARRRYTRRKNRICYLQEIFS |
| F149Y, | NEMAKVDDSFFHRLEESFLVEEDKKHERHPIFGNIVDEVAYHEKYPTIYHLRKKLVD |
| T166I, and | STDKADLRLIYLALAHMIKFRGHFLIEGDLNPDNSDVDKLFIQLVQTYNQLFEENPI |
| D167N in | NASGVDAKAILSARLSKSRRLENLIAQLPGEKKNGLFGNLIALSLGLTPNFKSNFDL |
| the TadA* | AEDAKLQLSKDTYDDDLDNLLAQIGDQYADLFLAAKNLSDAILLSDILRVNTEITKA |
| domain) | PLSASMVKRYDEHHQDLTLLKALVRQQLPEKYKEIFFDQSKNGYAGYIDGGASQEEF |
| | YKFIKPILEKMDGTEELLVKLNREDLLRKQRTFDNGIIPHQIHLGELHAILRRQGDF |
| | YPFLKDNREKIEKILTFRIPYYVGPLARGNSRFAWMTRKSEETITPWNFEEVVDKGA |
| | SAQSFIERMTNFDKNLPNEKVLPKHSLLYEYFTVYNELTKVKYVTEGMRKPAFLSGE |
| | QKKAIVDLLFKTNRKVTVKQLKEDYFKKIECFDSVEISGVEDRFNASLGTYHDLLKI |
| | IKDKDFLDNEENEDILEDIVLTLTLFEDREMIEERLKTYAHLFDDKVMKQLKRLRYT |
| | GWGRLSRKLINGIRDKQSGKTILDFLKSDGFANRNFMQLIHDDSLTFKEDIQKAQVS |
| | GQGDSLHEHIANLAGSPAIKKGILQTVKVVDELVKVMGGHKPENIVIEMARENQTTQ |
| | KGQKNSRERMKRIEEGIKELGSQILKEHPVENTQLQNEKLYLYYLQNGRDMYVDQEL |
| | DINRLSDYDVDHIVPQSFLKDDSIDNKVLTRSDKNRGKSDNVPSEEVVKKMKNYWRQ |
| | LLNAKLITQRKFDNLTKAERGGLSELDKAGFIKRQLVETRQITKHVAQILDSRMNTK |
| | YDENDKLIREVKVITLKSKLVSDFRKDFQFYKVREINNYHHAHDAYLNAVVGTALIK |
| | KYPKLESEFVYGDYKVYDVRKMIAKSEQEIGKATAKYFFYSNIMNFFKTEITLANGE |
| | IRKRPLIETNGETGEIVWDKGRDFATVRKVLSMPQVNIVKKTEVQTGGFSKESILPK |
| | GNSDKLIARKKDWDPKKYGGFNSPTVAYSVLVVAKVEKGKSKKLKSVKELLGITIME |
| | RSSFEKNPIDFLEAKGYKEVKKDLIIKLPKYSLFELENGRKRMLASAGVLQKGNELA |
| | LPSKYVNFLYLASHYEKLKGSPEDNEQKQLFVEQHKHYLDEIIEQISEFSKRVILAD |
| | ANLDKVLSAYNKHRDKPIREQAENIIHLFTLTNLGAPAAFKYFDTTINRKQYNTTKE |
| | VLDATLIRQSITGLYETRIDLSQLGGDEGADKRTADGSEFESPKKKRKV (SEQ ID |
| | NO: 931) |
| ABE8.20+ | TAATACGACTCACTATAAGGAAATAAGAGAGAAAAGAAGAGTAAGAAGAAATATAAG |
| | AGCCACCATGTCCGAAGTCGAGTTTTCCCATGAGTACTGGATGAGACACGCATTGAC |
| | TCTCGCAAAGAGGGCTCGAGATGAACGCGAGGTGCCCGTGGGGGCAGTACTCGTGCT |
| | CAACAATCGCGTAATCGGCGAAGGTTGGAATAGGGCAATCGGACTCCACGACCCCAC |
| | TGCACATGCGGAAATCATGGCCCTTCGACAGGGAGGGCTTGTGATGCAGAATTATCG |
| | ACTTTATGATGCGACGCTGTACTCGACGTTTGAACCTTGCGTAATGTGCGCGGGAGC |
| | TATGATTCACTCCCGCATTGGACGAGTTGTATTCGGTGTTCGCAACGCCAAGACGGG |
| | TGCCGCAGGTTCACTGATGGACGTGCTGCATCATCCAGGCATGAACCACCGGGTAGA |
| | AATCACAGAAGGCATATTGGCGGACGAATGTGCGGCGCTGTTGTGTGACTTTTATCG |
| | CATGCCCAGGCGTGTCTTTAACGCCCAGAAAAAAGCACAATCCTCTATAAACTCCGG |
| | CGGAAGCAGCGGAGGATCTTCTGGAAGCGAAACCCCAGGCACCAGCGAGTCTGCCAC |
| | ACCAGAATCATCTGGCGGTAGCTCCGGCGGCAGCGACAAGAAGTATTCTATCGGACT |
| | GGCCATCGGCACCAACTCTGTTGGATGGGCCGTGATCACCGACGAGTACAAGGTGCC |
| | CAGCAAGAAATTCAAGGTGCTGGGCAACACCGACAGGCACAGCATCAAGAAGAACCT |
| | GATCGGCGCACTGCTGTTCGACTCTGGCGAAACAGCCGAGGCCACCAGACTGAAGAG |
| | AACAGCCCGCAGACGGTACACCAGAAGAAAGAACCGGATCTGCTACCTCCAAGAGAT |
| | CTTCAGCAACGAGATGGCCAAGGTGGACGACAGCTTCTTCCACAGACTGGAAGAGTC |
| | CTTCCTGGTGGAAGAGGACAAGAAGCACGAGAGACACCCCATCTTCGGCAACATCGT |
| | GGACGAGGTGGCCTACCACGAGAAGTACCCCACCATCTACCACCTGAGAAAGAAACT |
| | GGTGGACAGCACCGACAAGGCCGACCTGAGACTGATCTATCTGGCCCTGGCTCACAT |
| | GATCAAGTTCCGGGGCCACTTCCTGATCGAGGGCGACCTGAATCCTGACAACAGCGA |
| | CGTGGACAAGCTGTTCATCCAGCTGGTGCAGACCTACAACCAGCTGTTCGAGGAAAA |
| | CCCCATCAACGCCAGCGGAGTGGATGCCAAGGCCATCCTGTCTGCCAGACTGAGCAA |
| | GAGCAGACGGCTGGAAAATCTGATCGCCCAGCTGCCTGGCGAGAAGAAGAATGGCCT |
| | GTTCGGCAACCTGATTGCCCTGAGCCTGGGCCTGACACCTAACTTCAAGAGCAACTT |
| | CGACCTGGCCGAGGACGCCAAACTGCAGCTGAGCAAGGACACCTACGACGACGACCT |
| | GGACAATCTGCTGGCCCAGATCGGCGATCAGTACGCCGACTTGTTTCTGGCCGCCAA |
| | GAATCTGAGCGACGCCATCCTGCTGTCCGACATCCTGAGAGTGAACACCGAGATCAC |
| | CAAGGCACCTCTGAGCGCCTCTATGGTCAAGAGATACGACGAGCACCACCAGGATCT |
| | GACCCTGCTGAAGGCCCTCGTTAGACAGCAGCTGCCAGAGAAGTACAAAGAGATTTT |
| | CTTCGACCAGAGCAAGAACGGCTACGCCGGCTACATTGATGGCGGAGCCAGCCAAGA |
| | GGAATTCTACAAGTTCATCAAGCCCATCCTCGAGAAGATGGACGGCACCGAGGAACT |
| | GCTGGTCAAGCTGAACAGAGAGGACCTGCTGAGAAAGCAGAGAACCTTCGACAACGG |
| | CATCATCCCTCACCAGATCCACCTGGGAGAACTGCACGCCATTCTGCGGAGACAAGG |
| | GGACTTTTACCCATTCCTGAAGGACAACCGGGAAAAGATCGAGAAAATCCTGACCTT |
| | CAGGATCCCCTACTACGTGGGACCACTGGCCAGAGGCAATAGCAGATTCGCCTGGAT |
| | GACCAGAAAGAGCGAGGAAACCATCACTCCCTGGAACTTCGAGGAAGTGGTGGACAA |
| | GGGCGCCAGCGCTCAGTCCTTCATCGAGCGGATGACCAACTTCGATAAGAACCTGCC |
| | TAACGAGAAGGTGCTGCCCAAGCACAGCCTGCTGTACGAGTACTTCACCGTGTACAA |
| | CGAGCTGACCAAAGTGAAATACGTGACCGAGGGAATGAGAAAGCCCGCCTTTCTGAG |
| | CGGCGAGCAGAAAAAGGCCATCGTGGATCTGCTGTTCAAGACCAACCGGAAAGTGAC |
| | CGTGAAGCAGCTGAAAGAGGACTACTTCAAGAAAATCGAGTGCTTCGACAGCGTCGA |
| | GATCTCCGGCGTGGAAGATCGGTTCAATGCCAGCCTGGGCACATACCACGATCTGCT |
| | GAAAATTATCAAGGACAAGGACTTCCTGGACAACGAAGAGAACGAGGACATCCTTGA |
| | GGACATCGTGCTGACACTGACCCTGTTTGAGGACAGAGAGATGATCGAGGAACGGCT |
| | GAAAACATACGCCCACCTGTTCGACGACAAAGTGATGAAGCAACTGAAGCGGCTGAG |
| | ATACACCGGCTGGGGCAGACTGTCTCGGAAGCTGATCAACGGCATCCGGGATAAGCA |
| | GTCCGGCAAGACCATCCTGGACTTTCTGAAGTCCGACGGCTTCGCCAACAGAAACTT |
| | CATGCAGCTGATTCACGACGACAGCCTCACCTTCAAAGAGGATATCCAGAAAGCCCA |
| | GGTGTCCGGCCAGGGCGATTCTCTGCATGAGCACATTGCCAACCTGGCCGGCTCTCC |
| | CGCCATTAAGAAAGGCATCCTGCAGACAGTGAAGGTGGTGGACGAGCTTGTGAAAGT |
| | GATGGGCGGACACAAGCCCGAGAACATCGTGATCGAAATGGCCAGAGAGAACCAGAC |
| | CACACAGAAGGGACAGAAGAACAGCCGCGAGAGAATGAAGCGGATCGAAGAGGGCAT |
| | CAAAGAGCTGGGCAGCCAGATCCTGAAAGAACACCCCGTGGAAAACACCCAGCTGCA |
| | GAACGAGAAGCTGTACCTGTACTACCTGCAGAATGGACGGGATATGTACGTGGACCA |
| | AGAGCTGGACATCAACAGACTGTCCGACTACGATGTGGACCATATCGTGCCCCAGTC |
| | TTTTCTGAAGGACGACTCCATCGACAACAAGGTCCTGACCAGATCCGACAAGAATCG |
| | GGGCAAGAGCGACAACGTGCCCTCCGAAGAGGTGGTCAAGAAGATGAAGAACTACTG |
| | GCGACAGCTGCTGAACGCCAAGCTGATTACCCAGCGGAAGTTCGACAATCTGACCAA |
| | GGCCGAAAGAGGCGGCCTGAGCGAACTGGATAAGGCCGGCTTCATCAAGAGACAGCT |
| | GGTGGAAACCCGGCAGATCACAAAGCACGTGGCACAGATTCTGGACTCTCGGATGAA |
| | CACTAAGTACGACGAGAACGACAAACTGATCCGCGAAGTGAAAGTCATCACCCTGAA |
| | GTCCAAGCTGGTGTCCGATTTCCGGAAGGATTTCCAGTTCTACAAAGTGCGCGAGAT |
| | CAACAACTACCATCACGCCCACGACGCCTACCTGAATGCCGTTGTTGGAACAGCCCT |
| | GATCAAAAAGTACCCTAAGCTGGAAAGCGAGTTCGTGTACGGCGACTACAAGGTGTA |
| | CGACGTGCGGAAGATGATCGCCAAGAGCGAGCAAGAGATTGGCAAGGCAACCGCCAA |
| | GTACTTCTTCTACAGCAACATCATGAACTTTTTCAAGACAGAGATCACCCTCGCCAA |
| | CGGCGAGATCAGAAAGCGGCCTCTGATCGAGACAAACGGCGAAACCGGCGAGATTGT |
| | GTGGGATAAGGGCAGAGACTTTGCCACAGTGCGGAAAGTGCTGAGCATGCCCCAAGT |
| | GAATATCGTGAAGAAAACCGAGGTGCAGACAGGCGGCTTCAGCAAAGAGTCTATCCT |
| | GCCTAAGGGGAACTCCGACAAGCTGATCGCCAGAAAGAAGGACTGGGACCCCAAGAA |
| | ATACGGCGGCTTTAACTCTCCCACCGTGGCCTATTCTGTTCTGGTGGTGGCCAAAGT |
| | GGAAAAGGGCAAGTCCAAGAAACTCAAGAGCGTGAAAGAGCTGCTGGGGATCACCAT |
| | CATGGAAAGAAGCAGCTTCGAGAAGAATCCGATCGATTTCCTCGAGGCCAAGGGTTA |
| | CAAAGAAGTGAAAAAGGACCTGATCATCAAGCTCCCCAAGTACTCCCTGTTCGAGCT |
| | GGAAAACGGCCGGAAGAGAATGCTGGCCTCTGCCGGTGTCCTGCAGAAGGGAAACGA |
| | ACTGGCCCTGCCTAGCAAATATGTGAACTTCCTGTACCTGGCCAGCCACTATGAGAA |
| | GCTGAAGGGCAGCCCCGAGGACAATGAGCAAAAGCAGCTGTTTGTGGAACAGCACAA |
| | GCACTACCTGGACGAGATCATCGAGCAGATCAGCGAGTTTAGCAAGAGAGTGATTCT |
| | GGCCGACGCCAATCTGGACAAAGTGCTGTCCGCCTACAACAAGCACCGGGACAAGCC |
| | TATCAGAGAGCAGGCCGAGAATATCATCCACCTGTTTACCCTGACCAACCTGGGAGC |
| | CCCTGCGGCCTTCAAGTACTTTGACACCACCATCAACAGGAAGCAGTACAACACCAC |
| | CAAAGAGGTGCTGGACGCCACTCTGATCCGCCAGTCTATCACCGGCCTGTACGAGAC |
| | ACGGATCGACCTGTCTCAACTCGGAGGCGACGAAGGCGCCGATAAGAGAACCGCCGA |
| | TGGCTCTGAGTTCGAGAGCCCTAAGAAAAAGCGCAAAGTGTAG (SEQ ID NO: 932) |
| Inlaid Base | MDKKYSIGLAIGTNSVGWAVITDEYKVPSKKFKVLGNTDRHSIKKNLIGALLFDSGE |
| Editor | TAEATRLKRTARRRYTRRKNRICYLQEIFSNEMAKVDDSFFHRLEESFLVEEDKKHE |
| (IBE) | RHPIFGNIVDEVAYHEKYPTIYHLRKKLVDSTDKADLRLIYLALAHMIKFRGHFLIE |
| referenced | GDLNPDNSDVDKLFIQLVQTYNQLFEENPINASGVDAKAILSARLSKSRRLENLIAQ |
| in FIG. 26 | LPGEKKNGLFGNLIALSLGLTPNFKSNFDLAEDAKLQLSKDTYDDDLDNLLAQIGDQ |
| (MSP684 | YADLFLAAKNLSDAILLSDILRVNTEITKAPLSASMIKRYDEHHQDLTLLKALVRQQ |
| mono TadA- | LPEKYKEIFFDQSKNGYAGYIDGGASQEEFYKFIKPILEKMDGTEELLVKLNREDLL |
| TadA7.10 | RKQRTFDNGSIPHQIHLGELHAILRRQEDFYPFLKDNREKIEKILTFRIPYYVGPLA |
| (V82S)- | RGNSRFAWMTRKSEETITPWNFEEVVDKGASAQSFIERMTNFDKNLPNEKVLPKHSL |
| MQKFRAER) | LYEYFTVYNELTKVKYVTEGMRKPAFLSGEQKKAIVDLLFKTNRKVTVKQLKEDYFK |
| | KIECFDSVEISGVEDRFNASLGTYHDLLKIIKDKDFLDNEENEDILEDIVLTLTLFE |
| | DREMIEERLKTYAHLFDDKVMKQLKRRRYTGWGRLSRKLINGIRDKQSGKTILDFLK |
| | SDGFANRNFMQLIHDDSLTFKEDIQKAQVSGQGDSLHEHIANLAGSPAIKKGILQTV |
| | KVVDELVKVMGRHKPENIVIEMARENQTTQKGQKNSRERMKRIEEGIKELGSQILKE |
| | HPVENTQLQNEKLYLYYLQNGRDMYVDQELDINRLSDYDVDHIVPQSFLKDDSIDNK |
| | VLTRSDKNRGKSDNVPSEEVVKKMKNYWRQLLNAKLITQRKFDNLTKAERGGLSELD |
| | KAGFIKRQLVETRQITKHVAQILDSRMNTKYDENDKLIREVKVITLKSKLVSDFRKD |
| | FQFYKVREINNYHHAHDAYLNAVVGTALIKKYPKLESEFVYGDYKVYDVRKMIAKSE |
| | QEIGSSGSETPGTSESATPESSGSEVEFSHEYWMRHALTLAKRARDEREVPVGAVLV |
| | LNNRVIGEGWNRAIGLHDPTAHAEIMALRQGGLVMQNYRLIDATLYSTFEPCVMCAG |
| | AMIHSRIGRVVFGVRNAKTGAAGSLMDVLHYPGMNHRVEITEGILADECAALLCYFF |
| | RMPRQVFNAQKKAQSSTDGKATAKYFFYSNIMNFFKTEITLANGEIRKRPLIETNGE |
| | TGEIVWDKGRDFATVRKVLSMPQVNIVKKTEVQTGGFSKESILPKRNSDKLIARKKD |
| | WDPKKYGGFMQPTVAYSVLVVAKVEKGKSKKLKSVKELLGITIMERSSFEKNPIDFL |
| | EAKGYKEVKKDLIIKLPKYSLFELENGRKRMLASAKFLQKGNELALPSKYVNFLYLA |
| | SHYEKLKGSPEDNEQKQLFVEQHKHYLDEIIEQISEFSKRVILADANLDKVLSAYNK |
| | HRDKPIREQAENIIHLFTLTNLGAPRAFKYFDTTIARKEYRSTKEVLDATLIHQSIT |
| | GLYETRIDLSQLGGD (SEQ ID NO: 933) |
| ABE9v1- | MSEVEFSHEYWMRHALTLAKRARDEREVPVGAVLVLNNRVIGEGWNRAIGLHDPTAH |
| NRCH | AEIMALRQGGLVMQNYRLYDATLYTTFEPCVMCAGAMIHSRIGRVVFGVRNAKTGAA |
| (ABE8.20 | GSLMDVLHHPGMNHRVEITEGILADECAALLCRFYRMPRRVFNAQKKAQSSTDSGGS |
| w/ the | SGGSSGSETPGTSESATPESSGGSSGGSDKKYSIGLAIGTNSVGWAVITDEYKVPSK |
| alterations | KFKVLGNTDRHSIKKNLIGALLFDSGETAEATRLKRTARRRYTRRKNRICYLQEIFS |
| S82T and | NEMAKVDDSFFHRLEESFLVEEDKKHERHPIFGNIVDEVAYHEKYPTIYHLRKKLVD |
| F149Y in | STDKADLRLIYLALAHMIKFRGHFLIEGDLNPDNSDVDKLFIQLVQTYNQLFEENPI |
| the TadA* | NASGVDAKAILSARLSKSRRLENLIAQLPGEKKNGLFGNLIALSLGLTPNFKSNFDL |
| domain) | AEDAKLQLSKDTYDDDLDNLLAQIGDQYADLFLAAKNLSDAILLSDILRVNTEITKA |
| | PLSASMVKRYDEHHQDLTLLKALVRQQLPEKYKEIFFDQSKNGYAGYIDGGASQEEF |
| | YKFIKPILEKMDGTEELLVKLNREDLLRKQRTFDNGIIPHQIHLGELHAILRRQGDF |
| | YPFLKDNREKIEKILTFRIPYYVGPLARGNSRFAWMTRKSEETITPWNFEEVVDKGA |
| | SAQSFIERMTNFDKNLPNEKVLPKHSLLYEYFTVYNELTKVKYVTEGMRKPAFLSGE |
| | QKKAIVDLLFKTNRKVTVKQLKEDYFKKIECFDSVEISGVEDRFNASLGTYHDLLKI |
| | IKDKDFLDNEENEDILEDIVLTLTLFEDREMIEERLKTYAHLFDDKVMKQLKRLRYT |
| | GWGRLSRKLINGIRDKQSGKTILDFLKSDGFANRNFMQLIHDDSLTFKEDIQKAQVS |
| | GQGDSLHEHIANLAGSPAIKKGILQTVKVVDELVKVMGGHKPENIVIEMARENQTTQ |
| | KGQKNSRERMKRIEEGIKELGSQILKEHPVENTQLQNEKLYLYYLQNGRDMYVDQEL |
| | DINRLSDYDVDHIVPQSFLKDDSIDNKVLTRSDKNRGKSDNVPSEEVVKKMKNYWRQ |
| | LLNAKLITQRKFDNLTKAERGGLSELDKAGFIKRQLVETRQITKHVAQILDSRMNTK |
| | YDENDKLIREVKVITLKSKLVSDFRKDFQFYKVREINNYHHAHDAYLNAVVGTALIK |
| | KYPKLESEFVYGDYKVYDVRKMIAKSEQEIGKATAKYFFYSNIMNFFKTEITLANGE |
| | IRKRPLIETNGETGEIVWDKGRDFATVRKVLSMPQVNIVKKTEVQTGGFSKESILPK |
| | GNSDKLIARKKDWDPKKYGGFNSPTVAYSVLVVAKVEKGKSKKLKSVKELLGITIME |
| | RSSFEKNPIDFLEAKGYKEVKKDLIIKLPKYSLFELENGRKRMLASAGVLQKGNELA |
| | LPSKYVNFLYLASHYEKLKGSPEDNEQKQLFVEQHKHYLDEIIEQISEFSKRVILAD |
| | ANLDKVLSAYNKHRDKPIREQAENIIHLFTLTNLGAPAAFKYFDTTINRKQYNTTKE |
| | VLDATLIRQSITGLYETRIDLSQLGGDEGADKRTADGSEFESPKKKRKV (SEQ ID |
| | NO: 934) |
| ABE9v1- | ATGTCCGAAGTCGAGTTTTCCCATGAGTACTGGATGAGACACGCATTGACTCTCGCA |
| NRCH | AAGAGGGCTCGAGATGAACGCGAGGTGCCCGTGGGGGCAGTACTCGTGCTCAACAAT |
| | CGCGTAATCGGCGAAGGTTGGAATAGGGCAATCGGACTCCACGACCCCACTGCACAT |
| | GCGGAAATCATGGCCCTTCGACAGGGAGGGCTTGTGATGCAGAATTATCGACTTTAT |
| | GATGCGACGCTGTACACCACGTTTGAACCTTGCGTAATGTGCGCGGGAGCTATGATT |
| | CACTCCCGCATTGGACGAGTTGTATTCGGTGTTCGCAACGCCAAGACGGGTGCCGCA |
| | GGTTCACTGATGGACGTGCTGCATCATCCAGGCATGAACCACCGGGTAGAAATCACA |
| | GAAGGCATATTGGCGGACGAATGTGCGGCGCTGTTGTGTCGTTTTTATCGCATGCCC |
| | AGGCGTGTCTTTAACGCCCAGAAAAAAGCACAATCCTCTACTGACTCCGGCGGAAGC |
| | AGCGGAGGATCTTCTGGAAGCGAAACCCCAGGCACCAGCGAGTCTGCCACACCAGAA |
| | TCATCTGGCGGTAGCTCCGGCGGCAGCGACAAGAAGTATTCTATCGGACTGGCCATC |
| | GGCACCAACTCTGTTGGATGGGCCGTGATCACCGACGAGTACAAGGTGCCCAGCAAG |
| | AAATTCAAGGTGCTGGGCAACACCGACAGGCACAGCATCAAGAAGAACCTGATCGGC |
| | GCACTGCTGTTCGACTCTGGCGAAACAGCCGAGGCCACCAGACTGAAGAGAACAGCC |
| | CGCAGACGGTACACCAGAAGAAAGAACCGGATCTGCTACCTCCAAGAGATCTTCAGC |
| | AACGAGATGGCCAAGGTGGACGACAGCTTCTTCCACAGACTGGAAGAGTCCTTCCTG |
| | GTGGAAGAGGACAAGAAGCACGAGAGACACCCCATCTTCGGCAACATCGTGGACGAG |
| | GTGGCCTACCACGAGAAGTACCCCACCATCTACCACCTGAGAAAGAAACTGGTGGAC |
| | AGCACCGACAAGGCCGACCTGAGACTGATCTATCTGGCCCTGGCTCACATGATCAAG |
| | TTCCGGGGCCACTTCCTGATCGAGGGCGACCTGAATCCTGACAACAGCGACGTGGAC |
| | AAGCTGTTCATCCAGCTGGTGCAGACCTACAACCAGCTGTTCGAGGAAAACCCCATC |
| | AACGCCAGCGGAGTGGATGCCAAGGCCATCCTGTCTGCCAGACTGAGCAAGAGCAGA |
| | CGGCTGGAAAATCTGATCGCCCAGCTGCCTGGCGAGAAGAAGAATGGCCTGTTCGGC |
| | AACCTGATTGCCCTGAGCCTGGGCCTGACACCTAACTTCAAGAGCAACTTCGACCTG |
| | GCCGAGGACGCCAAACTGCAGCTGAGCAAGGACACCTACGACGACGACCTGGACAAT |
| | CTGCTGGCCCAGATCGGCGATCAGTACGCCGACTTGTTTCTGGCCGCCAAGAATCTG |
| | AGCGACGCCATCCTGCTGTCCGACATCCTGAGAGTGAACACCGAGATCACCAAGGCA |
| | CCTCTGAGCGCCTCTATGGTCAAGAGATACGACGAGCACCACCAGGATCTGACCCTG |
| | CTGAAGGCCCTCGTTAGACAGCAGCTGCCAGAGAAGTACAAAGAGATTTTCTTCGAC |
| | CAGAGCAAGAACGGCTACGCCGGCTACATTGATGGCGGAGCCAGCCAAGAGGAATTC |
| | TACAAGTTCATCAAGCCCATCCTCGAGAAGATGGACGGCACCGAGGAACTGCTGGTC |
| | AAGCTGAACAGAGAGGACCTGCTGAGAAAGCAGAGAACCTTCGACAACGGCATCATC |
| | CCTCACCAGATCCACCTGGGAGAACTGCACGCCATTCTGCGGAGACAAGGGGACTTT |
| | TACCCATTCCTGAAGGACAACCGGGAAAAGATCGAGAAAATCCTGACCTTCAGGATC |
| | CCCTACTACGTGGGACCACTGGCCAGAGGCAATAGCAGATTCGCCTGGATGACCAGA |
| | AAGAGCGAGGAAACCATCACTCCCTGGAACTTCGAGGAAGTGGTGGACAAGGGCGCC |
| | AGCGCTCAGTCCTTCATCGAGCGGATGACCAACTTCGATAAGAACCTGCCTAACGAG |
| | AAGGTGCTGCCCAAGCACAGCCTGCTGTACGAGTACTTCACCGTGTACAACGAGCTG |
| | ACCAAAGTGAAATACGTGACCGAGGGAATGAGAAAGCCCGCCTTTCTGAGCGGCGAG |
| | CAGAAAAAGGCCATCGTGGATCTGCTGTTCAAGACCAACCGGAAAGTGACCGTGAAG |
| | CAGCTGAAAGAGGACTACTTCAAGAAAATCGAGTGCTTCGACAGCGTCGAGATCTCC |
| | GGCGTGGAAGATCGGTTCAATGCCAGCCTGGGCACATACCACGATCTGCTGAAAATT |
| | ATCAAGGACAAGGACTTCCTGGACAACGAAGAGAACGAGGACATCCTTGAGGACATC |
| | GTGCTGACACTGACCCTGTTTGAGGACAGAGAGATGATCGAGGAACGGCTGAAAACA |
| | TACGCCCACCTGTTCGACGACAAAGTGATGAAGCAACTGAAGCGGCTGAGATACACC |
| | GGCTGGGGCAGACTGTCTCGGAAGCTGATCAACGGCATCCGGGATAAGCAGTCCGGC |
| | AAGACCATCCTGGACTTTCTGAAGTCCGACGGCTTCGCCAACAGAAACTTCATGCAG |
| | CTGATTCACGACGACAGCCTCACCTTCAAAGAGGATATCCAGAAAGCCCAGGTGTCC |
| | GGCCAGGGCGATTCTCTGCATGAGCACATTGCCAACCTGGCCGGCTCTCCCGCCATT |
| | AAGAAAGGCATCCTGCAGACAGTGAAGGTGGTGGACGAGCTTGTGAAAGTGATGGGC |
| | GGACACAAGCCCGAGAACATCGTGATCGAAATGGCCAGAGAGAACCAGACCACACAG |
| | AAGGGACAGAAGAACAGCCGCGAGAGAATGAAGCGGATCGAAGAGGGCATCAAAGAG |
| | CTGGGCAGCCAGATCCTGAAAGAACACCCCGTGGAAAACACCCAGCTGCAGAACGAG |
| | AAGCTGTACCTGTACTACCTGCAGAATGGACGGGATATGTACGTGGACCAAGAGCTG |
| | GACATCAACAGACTGTCCGACTACGATGTGGACCATATCGTGCCCCAGTCTTTTCTG |
| | AAGGACGACTCCATCGACAACAAGGTCCTGACCAGATCCGACAAGAATCGGGGCAAG |
| | AGCGACAACGTGCCCTCCGAAGAGGTGGTCAAGAAGATGAAGAACTACTGGCGACAG |
| | CTGCTGAACGCCAAGCTGATTACCCAGCGGAAGTTCGACAATCTGACCAAGGCCGAA |
| | AGAGGCGGCCTGAGCGAACTGGATAAGGCCGGCTTCATCAAGAGACAGCTGGTGGAA |
| | ACCCGGCAGATCACAAAGCACGTGGCACAGATTCTGGACTCTCGGATGAACACTAAG |
| | TACGACGAGAACGACAAACTGATCCGCGAAGTGAAAGTCATCACCCTGAAGTCCAAG |
| | CTGGTGTCCGATTTCCGGAAGGATTTCCAGTTCTACAAAGTGCGCGAGATCAACAAC |
| | TACCATCACGCCCACGACGCCTACCTGAATGCCGTTGTTGGAACAGCCCTGATCAAA |
| | AAGTACCCTAAGCTGGAAAGCGAGTTCGTGTACGGCGACTACAAGGTGTACGACGTG |
| | CGGAAGATGATCGCCAAGAGCGAGCAAGAGATTGGCAAGGCAACCGCCAAGTACTTC |
| | TTCTACAGCAACATCATGAACTTTTTCAAGACAGAGATCACCCTCGCCAACGGCGAG |
| | ATCAGAAAGCGGCCTCTGATCGAGACAAACGGCGAAACCGGCGAGATTGTGTGGGAT |
| | AAGGGCAGAGACTTTGCCACAGTGCGGAAAGTGCTGAGCATGCCCCAAGTGAATATC |
| | GTGAAGAAAACCGAGGTGCAGACAGGCGGCTTCAGCAAAGAGTCTATCCTGCCTAAG |
| | GGGAACTCCGACAAGCTGATCGCCAGAAAGAAGGACTGGGACCCCAAGAAATACGGC |
| | GGCTTTAACTCTCCCACCGTGGCCTATTCTGTTCTGGTGGTGGCCAAAGTGGAAAAG |
| | GGCAAGTCCAAGAAACTCAAGAGCGTGAAAGAGCTGCTGGGGATCACCATCATGGAA |
| | AGAAGCAGCTTCGAGAAGAATCCGATCGATTTCCTCGAGGCCAAGGGTTACAAAGAA |
| | GTGAAAAAGGACCTGATCATCAAGCTCCCCAAGTACTCCCTGTTCGAGCTGGAAAAC |
| | GGCCGGAAGAGAATGCTGGCCTCTGCCGGTGTCCTGCAGAAGGGAAACGAACTGGCC |
| | CTGCCTAGCAAATATGTGAACTTCCTGTACCTGGCCAGCCACTATGAGAAGCTGAAG |
| | GGCAGCCCCGAGGACAATGAGCAAAAGCAGCTGTTTGTGGAACAGCACAAGCACTAC |
| | CTGGACGAGATCATCGAGCAGATCAGCGAGTTTAGCAAGAGAGTGATTCTGGCCGAC |
| | GCCAATCTGGACAAAGTGCTGTCCGCCTACAACAAGCACCGGGACAAGCCTATCAGA |
| | GAGCAGGCCGAGAATATCATCCACCTGTTTACCCTGACCAACCTGGGAGCCCCTGCG |
| | GCCTTCAAGTACTTTGACACCACCATCAACAGGAAGCAGTACAACACCACCAAAGAG |
| | GTGCTGGACGCCACTCTGATCCGCCAGTCTATCACCGGCCTGTACGAGACACGGATC |
| | GACCTGTCTCAACTCGGAGGCGACGAAGGCGCCGATAAGAGAACCGCCGATGGCTCT |
| | GAGTTCGAGAGCCCTAAGAAAAAGCGCAAAGTGTAG (SEQ ID NO: 942) |
| ABE9v2- | MSEVEFSHEYWMRHALTLAKRARDEREVPVGAVLVLNNRVIGEGWNRAIGLHDPTAH |
| NRCH | AEIMALRQGGLVMQNYRLYDATLYTTFEPCVMCAGAMIHSRIGRVVFGVRNAKTGAA |
| (ABE8.20 | GSLMDVLHHPGMNHRVEITEGILADECAALLCDFYRMPRRVFNAQKKAQSSINSGGS |
| w/ the | SGGSSGSETPGTSESATPESSGGSSGGSDKKYSIGLAIGTNSVGWAVITDEYKVPSK |
| alterations | KFKVLGNTDRHSIKKNLIGALLFDSGETAEATRLKRTARRRYTRRKNRICYLQEIFS |
| Y147D, | NEMAKVDDSFFHRLEESFLVEEDKKHERHPIFGNIVDEVAYHEKYPTIYHLRKKLVD |
| F149Y, | STDKADLRLIYLALAHMIKFRGHFLIEGDLNPDNSDVDKLFIQLVQTYNQLFEENPI |
| T166I, | NASGVDAKAILSARLSKSRRLENLIAQLPGEKKNGLFGNLIALSLGLTPNFKSNFDL |
| D167N and | AEDAKLQLSKDTYDDDLDNLLAQIGDQYADLFLAAKNLSDAILLSDILRVNTEITKA |
| S82T in the | PLSASMVKRYDEHHQDLTLLKALVRQQLPEKYKEIFFDQSKNGYAGYIDGGASQEEF |
| TadA* | YKFIKPILEKMDGTEELLVKLNREDLLRKQRTFDNGIIPHQIHLGELHAILRRQGDF |
| domain) | YPFLKDNREKIEKILTFRIPYYVGPLARGNSRFAWMTRKSEETITPWNFEEVVDKGA |
| | SAQSFIERMTNFDKNLPNEKVLPKHSLLYEYFTVYNELTKVKYVTEGMRKPAFLSGE |
| | QKKAIVDLLFKTNRKVTVKQLKEDYFKKIECFDSVEISGVEDRFNASLGTYHDLLKI |
| | IKDKDFLDNEENEDILEDIVLTLTLFEDREMIEERLKTYAHLFDDKVMKQLKRLRYT |
| | GWGRLSRKLINGIRDKQSGKTILDFLKSDGFANRNFMQLIHDDSLTFKEDIQKAQVS |
| | GQGDSLHEHIANLAGSPAIKKGILQTVKVVDELVKVMGGHKPENIVIEMARENQTTQ |
| | KGQKNSRERMKRIEEGIKELGSQILKEHPVENTQLQNEKLYLYYLQNGRDMYVDQEL |
| | DINRLSDYDVDHIVPQSFLKDDSIDNKVLTRSDKNRGKSDNVPSEEVVKKMKNYWRQ |
| | LLNAKLITQRKFDNLTKAERGGLSELDKAGFIKRQLVETRQITKHVAQILDSRMNTK |
| | YDENDKLIREVKVITLKSKLVSDFRKDFQFYKVREINNYHHAHDAYLNAVVGTALIK |
| | KYPKLESEFVYGDYKVYDVRKMIAKSEQEIGKATAKYFFYSNIMNFFKTEITLANGE |
| | IRKRPLIETNGETGEIVWDKGRDFATVRKVLSMPQVNIVKKTEVQTGGFSKESILPK |
| | GNSDKLIARKKDWDPKKYGGFNSPTVAYSVLVVAKVEKGKSKKLKSVKELLGITIME |
| | RSSFEKNPIDFLEAKGYKEVKKDLIIKLPKYSLFELENGRKRMLASAGVLQKGNELA |
| | LPSKYVNFLYLASHYEKLKGSPEDNEQKQLFVEQHKHYLDEIIEQISEFSKRVILAD |
| | ANLDKVLSAYNKHRDKPIREQAENIIHLFTLTNLGAPAAFKYFDTTINRKQYNTTKE |
| | VLDATLIRQSITGLYETRIDLSQLGGDEGADKRTADGSEFESPKKKRKV (SEQ ID |
| | NO: 935) |
| ABE9v2- | ATGTCCGAAGTCGAGTTTTCCCATGAGTACTGGATGAGACACGCATTGACTCTCGCA |
| NRCH | AAGAGGGCTCGAGATGAACGCGAGGTGCCCGTGGGGGCAGTACTCGTGCTCAACAAT |
| | CGCGTAATCGGCGAAGGTTGGAATAGGGCAATCGGACTCCACGACCCCACTGCACAT |
| | GCGGAAATCATGGCCCTTCGACAGGGAGGGCTTGTGATGCAGAATTATCGACTTTAT |
| | GATGCGACGCTGTACACCACGTTTGAACCTTGCGTAATGTGCGCGGGAGCTATGATT |
| | CACTCCCGCATTGGACGAGTTGTATTCGGTGTTCGCAACGCCAAGACGGGTGCCGCA |
| | GGTTCACTGATGGACGTGCTGCATCATCCAGGCATGAACCACCGGGTAGAAATCACA |
| | GAAGGCATATTGGCGGACGAATGTGCGGCGCTGTTGTGTGACTTTTATCGCATGCCC |
| | AGGCGTGTCTTTAACGCCCAGAAAAAAGCACAATCCTCTATAAACTCCGGCGGAAGC |
| | AGCGGAGGATCTTCTGGAAGCGAAACCCCAGGCACCAGCGAGTCTGCCACACCAGAA |
| | TCATCTGGCGGTAGCTCCGGCGGCAGCGACAAGAAGTATTCTATCGGACTGGCCATC |
| | GGCACCAACTCTGTTGGATGGGCCGTGATCACCGACGAGTACAAGGTGCCCAGCAAG |
| | AAATTCAAGGTGCTGGGCAACACCGACAGGCACAGCATCAAGAAGAACCTGATCGGC |
| | GCACTGCTGTTCGACTCTGGCGAAACAGCCGAGGCCACCAGACTGAAGAGAACAGCC |
| | CGCAGACGGTACACCAGAAGAAAGAACCGGATCTGCTACCTCCAAGAGATCTTCAGC |
| | AACGAGATGGCCAAGGTGGACGACAGCTTCTTCCACAGACTGGAAGAGTCCTTCCTG |
| | GTGGAAGAGGACAAGAAGCACGAGAGACACCCCATCTTCGGCAACATCGTGGACGAG |
| | GTGGCCTACCACGAGAAGTACCCCACCATCTACCACCTGAGAAAGAAACTGGTGGAC |
| | AGCACCGACAAGGCCGACCTGAGACTGATCTATCTGGCCCTGGCTCACATGATCAAG |
| | TTCCGGGGCCACTTCCTGATCGAGGGCGACCTGAATCCTGACAACAGCGACGTGGAC |
| | AAGCTGTTCATCCAGCTGGTGCAGACCTACAACCAGCTGTTCGAGGAAAACCCCATC |
| | AACGCCAGCGGAGTGGATGCCAAGGCCATCCTGTCTGCCAGACTGAGCAAGAGCAGA |
| | CGGCTGGAAAATCTGATCGCCCAGCTGCCTGGCGAGAAGAAGAATGGCCTGTTCGGC |
| | AACCTGATTGCCCTGAGCCTGGGCCTGACACCTAACTTCAAGAGCAACTTCGACCTG |
| | GCCGAGGACGCCAAACTGCAGCTGAGCAAGGACACCTACGACGACGACCTGGACAAT |
| | CTGCTGGCCCAGATCGGCGATCAGTACGCCGACTTGTTTCTGGCCGCCAAGAATCTG |
| | AGCGACGCCATCCTGCTGTCCGACATCCTGAGAGTGAACACCGAGATCACCAAGGCA |
| | CCTCTGAGCGCCTCTATGGTCAAGAGATACGACGAGCACCACCAGGATCTGACCCTG |
| | CTGAAGGCCCTCGTTAGACAGCAGCTGCCAGAGAAGTACAAAGAGATTTTCTTCGAC |
| | CAGAGCAAGAACGGCTACGCCGGCTACATTGATGGCGGAGCCAGCCAAGAGGAATTC |
| | TACAAGTTCATCAAGCCCATCCTCGAGAAGATGGACGGCACCGAGGAACTGCTGGTC |
| | AAGCTGAACAGAGAGGACCTGCTGAGAAAGCAGAGAACCTTCGACAACGGCATCATC |
| | CCTCACCAGATCCACCTGGGAGAACTGCACGCCATTCTGCGGAGACAAGGGGACTTT |
| | TACCCATTCCTGAAGGACAACCGGGAAAAGATCGAGAAAATCCTGACCTTCAGGATC |
| | CCCTACTACGTGGGACCACTGGCCAGAGGCAATAGCAGATTCGCCTGGATGACCAGA |
| | AAGAGCGAGGAAACCATCACTCCCTGGAACTTCGAGGAAGTGGTGGACAAGGGCGCC |
| | AGCGCTCAGTCCTTCATCGAGCGGATGACCAACTTCGATAAGAACCTGCCTAACGAG |
| | AAGGTGCTGCCCAAGCACAGCCTGCTGTACGAGTACTTCACCGTGTACAACGAGCTG |
| | ACCAAAGTGAAATACGTGACCGAGGGAATGAGAAAGCCCGCCTTTCTGAGCGGCGAG |
| | CAGAAAAAGGCCATCGTGGATCTGCTGTTCAAGACCAACCGGAAAGTGACCGTGAAG |
| | CAGCTGAAAGAGGACTACTTCAAGAAAATCGAGTGCTTCGACAGCGTCGAGATCTCC |
| | GGCGTGGAAGATCGGTTCAATGCCAGCCTGGGCACATACCACGATCTGCTGAAAATT |
| | ATCAAGGACAAGGACTTCCTGGACAACGAAGAGAACGAGGACATCCTTGAGGACATC |
| | GTGCTGACACTGACCCTGTTTGAGGACAGAGAGATGATCGAGGAACGGCTGAAAACA |
| | TACGCCCACCTGTTCGACGACAAAGTGATGAAGCAACTGAAGCGGCTGAGATACACC |
| | GGCTGGGGCAGACTGTCTCGGAAGCTGATCAACGGCATCCGGGATAAGCAGTCCGGC |
| | AAGACCATCCTGGACTTTCTGAAGTCCGACGGCTTCGCCAACAGAAACTTCATGCAG |
| | CTGATTCACGACGACAGCCTCACCTTCAAAGAGGATATCCAGAAAGCCCAGGTGTCC |
| | GGCCAGGGCGATTCTCTGCATGAGCACATTGCCAACCTGGCCGGCTCTCCCGCCATT |
| | AAGAAAGGCATCCTGCAGACAGTGAAGGTGGTGGACGAGCTTGTGAAAGTGATGGGC |
| | GGACACAAGCCCGAGAACATCGTGATCGAAATGGCCAGAGAGAACCAGACCACACAG |
| | AAGGGACAGAAGAACAGCCGCGAGAGAATGAAGCGGATCGAAGAGGGCATCAAAGAG |
| | CTGGGCAGCCAGATCCTGAAAGAACACCCCGTGGAAAACACCCAGCTGCAGAACGAG |
| | AAGCTGTACCTGTACTACCTGCAGAATGGACGGGATATGTACGTGGACCAAGAGCTG |
| | GACATCAACAGACTGTCCGACTACGATGTGGACCATATCGTGCCCCAGTCTTTTCTG |
| | AAGGACGACTCCATCGACAACAAGGTCCTGACCAGATCCGACAAGAATCGGGGCAAG |
| | AGCGACAACGTGCCCTCCGAAGAGGTGGTCAAGAAGATGAAGAACTACTGGCGACAG |
| | CTGCTGAACGCCAAGCTGATTACCCAGCGGAAGTTCGACAATCTGACCAAGGCCGAA |
| | AGAGGCGGCCTGAGCGAACTGGATAAGGCCGGCTTCATCAAGAGACAGCTGGTGGAA |
| | ACCCGGCAGATCACAAAGCACGTGGCACAGATTCTGGACTCTCGGATGAACACTAAG |
| | TACGACGAGAACGACAAACTGATCCGCGAAGTGAAAGTCATCACCCTGAAGTCCAAG |
| | CTGGTGTCCGATTTCCGGAAGGATTTCCAGTTCTACAAAGTGCGCGAGATCAACAAC |
| | TACCATCACGCCCACGACGCCTACCTGAATGCCGTTGTTGGAACAGCCCTGATCAAA |
| | AAGTACCCTAAGCTGGAAAGCGAGTTCGTGTACGGCGACTACAAGGTGTACGACGTG |
| | CGGAAGATGATCGCCAAGAGCGAGCAAGAGATTGGCAAGGCAACCGCCAAGTACTTC |
| | TTCTACAGCAACATCATGAACTTTTTCAAGACAGAGATCACCCTCGCCAACGGCGAG |
| | ATCAGAAAGCGGCCTCTGATCGAGACAAACGGCGAAACCGGCGAGATTGTGTGGGAT |
| | AAGGGCAGAGACTTTGCCACAGTGCGGAAAGTGCTGAGCATGCCCCAAGTGAATATC |
| | GTGAAGAAAACCGAGGTGCAGACAGGCGGCTTCAGCAAAGAGTCTATCCTGCCTAAG |
| | GGGAACTCCGACAAGCTGATCGCCAGAAAGAAGGACTGGGACCCCAAGAAATACGGC |
| | GGCTTTAACTCTCCCACCGTGGCCTATTCTGTTCTGGTGGTGGCCAAAGTGGAAAAG |
| | GGCAAGTCCAAGAAACTCAAGAGCGTGAAAGAGCTGCTGGGGATCACCATCATGGAA |
| | AGAAGCAGCTTCGAGAAGAATCCGATCGATTTCCTCGAGGCCAAGGGTTACAAAGAA |
| | GTGAAAAAGGACCTGATCATCAAGCTCCCCAAGTACTCCCTGTTCGAGCTGGAAAAC |
| | GGCCGGAAGAGAATGCTGGCCTCTGCCGGTGTCCTGCAGAAGGGAAACGAACTGGCC |
| | CTGCCTAGCAAATATGTGAACTTCCTGTACCTGGCCAGCCACTATGAGAAGCTGAAG |
| | GGCAGCCCCGAGGACAATGAGCAAAAGCAGCTGTTTGTGGAACAGCACAAGCACTAC |
| | CTGGACGAGATCATCGAGCAGATCAGCGAGTTTAGCAAGAGAGTGATTCTGGCCGAC |
| | GCCAATCTGGACAAAGTGCTGTCCGCCTACAACAAGCACCGGGACAAGCCTATCAGA |
| | GAGCAGGCCGAGAATATCATCCACCTGTTTACCCTGACCAACCTGGGAGCCCCTGCG |
| | GCCTTCAAGTACTTTGACACCACCATCAACAGGAAGCAGTACAACACCACCAAAGAG |
| | GTGCTGGACGCCACTCTGATCCGCCAGTCTATCACCGGCCTGTACGAGACACGGATC |
| | GACCTGTCTCAACTCGGAGGCGACGAAGGCGCCGATAAGAGAACCGCCGATGGCTCT |
| | GAGTTCGAGAGCCCTAAGAAAAAGCGCAAAGTGTAG (SEQ ID NO: 943) |

[0797] Experiments were undertaken to evaluate editing efficiencies in CD34+ hematopoietic stem cells (HSCs) using the base editors ABE8.20, ABE9v1, and ABE9v2 (see Table 17) in combination with the guide gRNA931 (CC200). The cells were transfected with the guide and mRNA encoding the base editors using electroporation. The cells were grown in XVIVO serum free stem cell medium. All of the combinations evaluated resulted in editing efficiencies of greater than 50% (see FIG. 27). The resulting edited cells showed improved escape from ABTx052 binding 2 days post-electroporation (FIG. 28).

[0798] The base editors used to edit the CD117 polynucleotide were suitable for use in introducing a Makassar edit to a beta globin gene. CD34+ hematopoietic stem cells were edited in multiplex by contacting them with an mRNA polynucleotide encoding an adenosine deaminase (see ABE8.20+, ABE9v1, and ABE9v2 of Table 17) and the guide RNAs sgRNA_027 and gRNA931. High editing levels of base editing were achieved at the beta globin gene (HBB) locus for sickle to Makassar gene correction (FIG. 31A). The multiplex edited cells showed reduced binding to mAb-7 (i.e., ABTx052) (FIG. 31B). Therefore, high levels of base editing at the HBB gene locus for sickle to Makassar gene correction and CD117 was achieved using a single ABE.

[0799] An experiment was undertaken to evaluate binding of ABTx052 to M07e and hCD34+ cells surface-expressing either WT CD117 or a CD117 variant prepared by base editing the cells using an adenosine deaminase (ABE9v2) and gRNA931. It was determined that ABTx052 bound with high affinity to cells expressing WT CD117 while the base-edited cells expressing the CD117 variant (ESCAPE-2 variant) escaped recognition by ABTx052 at all concentrations of the antibody that were evaluated (FIGS. 41A and 41B).

[0800] A further experiment was undertaken in vitro to determine whether the altered CD117 polypeptide expressed in CD34+ hematopoietic stem cells base edited using gRNA931 was fully functional. The cells were multiplex base edited using an adenosine deaminase and the guide polynucleotides sgRNA_027 and gRNA931. The cells were grown in vitro, and it was assessed whether the altered CD117 polypeptide was capable of binding SCF and whether the SCF binding induced phosphorylation. It was determined that SCF did bind to and induce phosphorylation of the altered CD117 polypeptide expressed by the CD34+ cells, even in the presence of the ABTx052 antibody (FIG. 43). The cells evaluated were either bi-allelic or mono-allelic for the altered CD117 polypeptide, and both cell types were signaling competent. Therefore, the epitope alteration contained in the altered CD117 polypeptide did not interfere with normal receptor-ligand binding.

[0801] The multiplex base edited primary hCD34+HSPCs prepared as described above using an adenosine deaminase and sgRNA_027 and gRNA931 were evaluated to determine if the cells were able to escape depletion by ABTx052. It was determined that the cells did, in fact, escape depletion (FIGS. 42A and 42B). In an in vitro competition assay, ABTx052 mediated enrichment of cells expressing the altered CD117 polypeptide produced through base editing when grown in co-culture with unedited cells at an initial edited cells to unedited cells ratio of 1:1. Unedited cells reached levels of SCF withdrawal conditions in a dose-dependent fashion, whereas the multiplex base edited CD34+ cells maintained viability (FIG. 42A). Enrichment of the CD117 variant was confirmed using next-generation sequencing (NGS) (FIG. 42B).

[0802] Next, in vivo depletion of wild type hematopoietic stem cells (HSCs) in the bone marrow of NSG mice mediated by ABTx052 (FIG. 44A) or ABTx135 (FIG. 44B) administration (20 mg antibody/kg mouse body weight) was evaluated. At 4 weeks post-humanization (i.e., post-administration of the HSCs), the NSG mice were administered the monoclonal antibody (mAb) ABTx052 or ABTx135. Chimerism was measured at two weeks following administration of ABTx052 (FIG. 44A) and at 8 and 12 weeks following administration of ABTx135 (FIG. 44B). Significant reductions in chimerism was observed in mice treated with ABTx052 at 2 weeks post-administration of the antibody. At longer time points, even with a single dose of ABTx135, even further reductions in chimerism were observed, suggesting that ABTx135 could abrogate long-term engraftment of wild-type HSPCs in vivo.

[0803] The above-presented results demonstrate the development of a pair containing a base-edited antigen and a corresponding antibody that enables edited cells to “ESCAPE” binding from a monoclonal antibody (mAb) that can deplete unedited HSCs both in vitro and in vivo. Combined with a therapeutic Makassar edit that eliminate the causative sickle cell disease protein, the ESCAPE strategy presents a promising new paradigm for autologous stem cell therapies in treatment of sickle cell anemia.

[0804] The Hb G-Makassar-compatible ESCAPE strategy presented above demonstrated not only highly efficient editing of CD117 polynucleotides in HSCs, but also the ability to evade binding by a monoclonal antibody and subsequent depletion mediated thereby in vitro. The above experiments demonstrate that primary human HSPCs harboring the engineered CD117 epitope could effectively evade depletion mediated by the blocking of the CD117 ligand (SCF) binding by a highly specific and potent mAb in vitro. Biological assessment of receptor function suggested that the engineered CD117 epitope was compatible with normal function. In vivo studies that were conducted also suggested the mAb was effective in depleting non-edited HSPCs.

[0805] With the above-described non-genotoxic conditioning approach, the direct editing of the causative sickle cell mutation to the naturally occurring and asymptomatic Hb G-Makassar is a promising new potential treatment paradigm for autologous hematopoietic stem cell transplant (HSCT) for patients with sickle cell anemia.

### Example 3: Cryo-Electron Microscopy (EM) Structures

[0806] To determine the structure of ABTx052 bound to CD117, cryo-electron microscopy (cryo-EM) was utilized to determine a ˜3.0 Å structure of CD117/c-KIT in complex with ABTx052-Fab in solution state (FIGS. 32A-32C). Also, FIGS. 89 and 90 provide ribbon diagrams showing structures of CD117 bound by ABTx052 and of stem cell factor (SCF) bound to CD117, respectively, as determined using cryo-EM. High structural similarity between complexes of wild type CD117 or the CC128 variant of CD117 with SCF showed that the CC128-Y259C—N260D substitutions in the CC128 variant did not affect the protein structure and, consequently, its function in binding SCF.

### Example 4: Modifications to ABTx052 to Reduce Mast Cell Degranulation

[0807] Experiments were undertaken to determine what modifications to the Fc domain of ABTx052 would reduce the degranulation of mast cells contacted with the antibody. ABTx052 variants containing altered Fc domains were prepared. In particular mAb-7-FcEng-1, mAB-7-FcEng-3, and mAb-7-FcEng-3, were prepared, which correspond to ABTx052 modified to contain the Fc modifications L234A, L235A (LALA); L234A, L235A, P329G (LALAPG); L234S, L235T, G236R (LSLTGR); and L234A, L235A, D265A (LALADA), respectively, referenced to the following amino acid sequence: SGAAVKKPGESLKISCKGSGYRFTSYWIGWVRQMPGKGLEWMGI IYPGDSDTRYSPSFQGQVTI SAGKSISTAYLOWSSLKASDTAMYYCARHGRGYNGYEGAFDIWGQGTMVTVSSASTKGPSVFPL APSSKSTSGGTAALGCLVKDYFPEPVTVSWNSGALTSGVHTF PAVLQSSGLYSLSSVVTVPSSS LGTQTYI CNVNHKPSNTKVDKKVEPKSCDKTHTCPPCPAPELLGGPSVFLFPPKPKDTLMISRT PEVTCVVVDVSHEDPEVKFNWYVDGVEVHNAKTKPREEQYNSTYRVVSVLTVLHQDWLNGKEYK CKVSNKALPAPIEKTISKAKGQPREPQVYTLPPSRDELTKNQVSLTCLVKGFYPSDIAVEWESN GQPENNYKTTPPVLDSDGSFFLYSKLTVDKSRWQQGNVFSCSVMHEALHNHYTQKSLSLSPG (positions 7-1101 of SEQ ID NO: 419). Degranulation of mast cells in the presence of the ABTx052 variants and control antibodies was measured using a mast cell degranulation assay. In brief, CD34+ cells were differentiated into mast cells using established protocols, the cells were then sensitized with human IgE or treated with interferon gamma, which enhances the expression of Fcgamma receptor on the cell surface. The cells were then contacted with the antibodies and cell degranulation was measured by detecting betahexosaminidase release in the supernatant. Mast cells sensitized with IgE showed degranulation when incubated with anti-human IgE, and this served as a positive control for the assay (FIG. 33A). The positive control antibodies 104D2 and NEG085 were known previously to cause mast cell degranulation upon incubation with mast cells. Unmodified ABTx052 antibody led to some mast cell degranulation, in vitro. It was determined that the ABTx052 variants resulted in reduced levels of mast cell degranulation relative to the unmodified ABTx052 antibody (FIG. 33A), as measured by reduced levels of beta hexosaminidase release in vitro. It was also determined that ABTx052 selectively depleted unedited CD34+ cells in vitro, while CD117-edited cells retained viability (FIG. 33B). It was found that the ABTx135 (ABTx052 with a LALADA alteration in the Fc domain) effected similar levels of cell depletion in both human and Cynomolgus CD34+ cells (FIGS. 33C and 33D). Cells contacted with ABTx052 or the ABTx052 Fc variants mimicked complete SCF withdrawal.

### Example 5: ABTx052 Variants that Bound Wild-Type CD117 and that Showed Low-to-No Binding to CD117 Variants

[0808] Experiments were undertaken to identify ABTx052 variants that were capable of binding wild-type CD117 while showing reduced binding to the CD117 variants CC128 and CC200. The CC128 and CC200 variants of CD117 were expressed from polynucleotides prepared by base editing a polynucleotide encoding wild-type CD117 using a base editor system containing the guide polynucleotide CC128 or CC200, respectively, and an adenosine deaminase base editor (ABE). The ABTx052 variants each contained a single amino acid alteration in either the heavy chain variable region (VH) or the light chain variable region (VL) of ABTx052, where the alteration was at one of the positions highlighted in bold in the below VH and VL sequences:

ABTx052 Heavy chain variable region (VH)
(SEQ ID NO: 959)
QVQLVQSGAAVKKPGESLKISCKGSGYRFTSYWIGWVRQMPGKGLEWMG
IIYPGDSDTRYSPSFQGQVTISAGKSISTAYLQWSSLKASDTAMYYCAR
HGRGYNGYEGAFDIWGQGTMVTVSS
ABTx052 Light chain variable region (VL)
(SEQ ID NO: 960)
AIQLTQSPSSLSASVGDRVTITCRASQGISSALAWYQQKPGKAPKLLIY
DASSLESGVPSRFSGSGSGTDFTLTISSLQPEDFATYYCQQFNSYPLTF
GGGTKVEIKRTV.

[0809] In particular, ABTx052 variants containing the following alterations in the heavy chain variable region (VH) or in the light chain variable region (VL) were prepared: VH_R59K, VH_N104D, VH_G105A, VH_E107D (ABTx181), VL_F91T, VL_F91V, VL_N92R, VL_N92Y, VL_S93G, VL_Y94H, and VL_Y94S. Not intending to be bound by theory, amnio acid position N104 is a deamination site. Three of the ABTx052 variants contained a VH CDR3 with one of the following amino acid sequences: ARHGRGYDGYEGAFDI (SEQ ID NO: 948), ARHGRGYNAYEGAFDI (SEQ ID NO: 949), ARHGRGYNGYDGAFDI (SEQ ID NO: 950). One of the ABTx052 variants contained a VH CDR2 with the following amino acid sequence: IYPGDSDTK (SEQ ID NO: 972). Seven of the ABTx052 variants contained a VL CDR3 with one of the following amino acid sequences: QQTNSYPLT (SEQ ID NO: 951), QQVNSYPLT (SEQ ID NO: 952), QQFRSYPLT (SEQ ID NO: 953), QQFYSYPLT (SEQ ID NO: 954), QQFNGYPLT (SEQ ID NO: 957), QQFNSHPLT (SEQ ID NO: 955), QQFNSSPLT (SEQ ID NO: 956). Amino acid sequences for variable light chains and variable heavy chains corresponding to the ABTx052 variants are provide below:

VH_R59K:
(SEQ ID NO: 961)
QVQLVQSGAAVKKPGESLKISCKGSGYRFTSYWIGWVRQMPGKGLEWMG
IIYPGDSDTKYSPSFQGQVTISAGKSISTAYLQWSSLKASDTAMYYCAR
HGRGYNGYEGAFDIWGQGTMVTVSS.
VH_N104D:
(SEQ ID NO: 962)
QVQLVQSGAAVKKPGESLKISCKGSGYRFTSYWIGWVRQMPGKGLEWMG
IIYPGDSDTRYSPSFQGQVTISAGKSISTAYLQWSSLKASDTAMYYCAR
HGRGYDGYEGAFDIWGQGTMVTVSS.
VH_G105A:
(SEQ ID NO: 963)
QVQLVQSGAAVKKPGESLKISCKGSGYRFTSYWIGWVRQMPGKGLEWMG
IIYPGDSDTRYSPSFQGQVTISAGKSISTAYLQWSSLKASDTAMYYCAR
HGRGYNAYEGAFDIWGQGTMVTVSS.
VH_E107D (ABTx181):
(SEQ ID NO: 964)
QVQLVQSGAAVKKPGESLKISCKGSGYRFTSYWIGWVRQMPGKGLEWMG
IIYPGDSDTRYSPSFQGQVTISAGKSISTAYLQWSSLKASDTAMYYCAR
HGRGYNGYDGAFDIWGQGTMVTVSS.
VL_F91T:
(SEQ ID NO: 965)
AIQLTQSPSSLSASVGDRVTITCRASQGISSALAWYQQKPGKAPKLLIY
DASSLESGVPSRFSGSGSGTDFTLTISSLQPEDFATYYCQQTNSYPLTF
GGGTKVEIK.
VL_F91V:
(SEQ ID NO: 966)
AIQLTQSPSSLSASVGDRVTITCRASQGISSALAWYQQKPGKAPKLLIY
DASSLESGVPSRFSGSGSGTDFTLTISSLQPEDFATYYCQQVNSYPLTF
GGGTKVEIK.
VL_N92R:
(SEQ ID NO: 967)
AIQLTQSPSSLSASVGDRVTITCRASQGISSALAWYQQKPGKAPKLLIY
DASSLESGVPSRFSGSGSGTDFTLTISSLQPEDFATYYCQQFRSYPLTF
GGGTKVEIK.
VL_N92Y:
(SEQ ID NO: 968)
AIQLTQSPSSLSASVGDRVTITCRASQGISSALAWYQQKPGKAPKLLIY
DASSLESGVPSRFSGSGSGTDFTLTISSLQPEDFATYYCQQFYSYPLTF
GGGTKVEIK.
VL_S93G:
(SEQ ID NO: 969)
AIQLTQSPSSLSASVGDRVTITCRASQGISSALAWYQQKPGKAPKLLIY
DASSLESGVPSRFSGSGSGTDFTLTISSLQPEDFATYYCQQFNGYPLTF
GGGTKVEIK.
VL_Y94H:
(SEQ ID NO: 970)
AIQLTQSPSSLSASVGDRVTITCRASQGISSALAWYQQKPGKAPKLLIY
DASSLESGVPSRFSGSGSGTDFTLTISSLQPEDFATYYCQQFNSHPLTF
GGGTKVEIK.
VL_Y94S:
(SEQ ID NO: 971)
AIQLTQSPSSLSASVGDRVTITCRASQGISSALAWYQQKPGKAPKLLIY
DASSLESGVPSRFSGSGSGTDFTLTISSLQPEDFATYYCQQFNSSPLTF
GGGTKVEIK.

[0810] Binding of each of the ABTx052 variants to wild-type CD117 and to the CD117 variants CC128 and CC200 was quantitatively evaluated (see FIGS. 45A-45K and 54) and Tables 18A and 18B). Variants with a slow off-rate for binding to wild-type CD117 were of particular interest on account of the slow off-rate likely corresponding to an increased likelihood of interfering with the binding of stem cell factor (SCF) to CD117. The ABTx052 variant VH_E107D (ABTx181) showed good binding to wild-type CD117 with a slow off-rate and low binding to both CD117 variants CC128 and CC200, which would be advantageous characteristics for use of the antibody in the engineered stem cell antibody-paired evasion (ESCAPE) approaches for engraftment of hematopoietic stem cells (HSCs) provided herein. ABTx052 variant VH_E107D had a K_{D} for binding to CD117 that was comparable to that of ABTx052 (FIG. 54 and Table 18B). Most of the ABTx052 variants evaluated showed binding to M07e cells that expressed wild-type CD117 and reduced binding to M07e cells that expressed the CC128 variant of CD117 (FIGS. 46A and 46B).

TABLE 18A
Summary of binding of the indicated ABTx052 variants to wild-
type CD117 and to the CD117 variants CC128 and CC200.

| Antibody | CD117 | | | Off | | | | Full |
|---|---|---|---|---|---|---|---|---|
| ID | wt | CC128 | CC200 | Rate | K_{D} (M) | kₐ (1/Ms) | k_{dis} (1/s) | R\hat{ }2 |
| VL_F91T | strong | similar | >>control | slow | 1.91E−10 | 5.43E+05 | 1.04E−04 | 0.973 |
| VH_G105A | strong | similar | similar | slow | 2.54E−10 | 6.01E+05 | 1.53E−04 | 0.9759 |
| VL_F91V | strong | <control² | similar | slow | 2.34E−10 | 6.54E+05 | 1.53E−04 | 0.9813 |
| VH_E107D | strong | <<control | <<control | slow | 3.76E−10 | 6.09E+05 | 2.29E−04 | 0.9762 |
| (ABTx181) | | | | | | | | |
| VH_N104D | strong | <<control | similar | slow | 4.95E−10 | 6.91E+05 | 3.42E−04 | 0.9677 |
| VL_N92R | strong | NO³ | NO | medium | 6.83E−10 | 6.35E+05 | 4.34E−04 | 0.9747 |
| VL_N92Y | strong_F⁴ | NO | NO | medium | 8.41E−10 | 7.55E+05 | 6.35E−04 | 0.9764 |
| VH_R59K | strong_F | NO | NO | medium | 9.86E−10 | 7.23E+05 | 7.13E−04 | 0.9701 |
| VL_Y94H | Strong_F | NO | NO | Fast | 3.16E−09 | 5.63E+05 | 1.78E−03 | 0.9791 |
| VL_Y94S | strong_F | NO | NO | Fast | 3.38E−09 | 6.43E+05 | 2.18E−03 | 0.9667 |
| ABTx135 | strong | control | control | slow | 2.60E−10 | 6.77E+05 | 1.76E−04 | 0.9733 |
| VL_S93G | strong | strong | strong | slow | 7.16E−11 | 6.71E+05 | 4.81E−05 | 0.984 |

²“<<control,” “<control,” and “>>control” indicate much lower binding than ABTx135, which had binding characteristics similar to ABTx052, less binding than ABTx135, and much greater binding than ABTx135, respectively.
³“NO” indicates no measured binding.
⁴“strong F” indicates strong binding with a medium to fast off rate

TABLE 18B
Summary of binding of the indicated ABTx052 variants to wild-
type CD117 and to the CD117 variants CC128 and CC200.

| | | | | Full |
|---|---|---|---|---|
| Ab ID | K_{D}(M) | Kₐ (1/Ms) | K_{dis} (1/s) | R\hat{ }2 |
| ABTx052 | 9.298E−09 | 1.272E05 | 1.182E−03 | 0.9966 |
| VH_E107D | 9.324E−09 | 1.772E05 | 1.652E−03 | 0.9838 |
| (ABTx181) | | | | |

[0811] As described in Table 18, the K_{D} (equilibrium dissociation constant), kₐ (equilibrium association constant), k_{dis} (equilibrium dissociation rate constant), and Full R\hat{ }2 values characterize binding of the indicated ABTx052 variant or ABTx135 to wild-type CD117. R\hat{ }2 ranged from 0-1, where a value of 1 indicated that predictions calculated using the K_{D}, Kₐ, and Kdis constants exactly predicted the observed values. A “slow off rate” is indicated by a k_{dis} of less than about 4E-04. A “medium” off rate is indicated by a k_{dis} of between about 4E-04 and 1E-03. A “fast” off rate is indicated by a k_{dis} of less than about 1E-03.

### Example 6: mAb-7 Treatment Induced Hematopoietic Stem and Progenitor Cell (HSPC) Apoptosis In Vitro

[0812] Experiments were undertaken to demonstrate that treatment with ABTx135 induced apoptosis of HSPC cells. Healthy human mobilized peripheral blood derived CD34+HSPCs were thawed and loaded with cytoplasmic dye cell-trace violet. A portion of the cells were then cultured in the presence of varying concentrations of stem cell factor (SCF) (0-100 ng/ml). The other portion of the cells were cultured in the presence of 100 ng/mL SCF and varying concentrations (10-10000 ng/mL) of ABTx135. The cells were cultured for 5 days at 37° C. using a tissue culture incubator. At Day 5, the cells were co-stained with Annexin V and 7-AAD and interrogated using flow cytometry (FIGS. 52A-52C). ABTx135 treatment induced apoptosis of the cells (FIG. 52C).

### Example 7: ABTx135 Engraftment of CC128 Base Edited Hematopoietic Stem and Progenitor Cells (HSPCs) Post Anti-CD117 mAb-Based Conditioning

[0813] Experiments were undertaken to demonstrate the engraftment of base edited hematopoietic stem cells (HSCs) in mice previously treated with an anti-CD117 monoclonal antibody. As shown in FIG. 53A, NBSGW mice were first transplanted with 1e6 wild type (unedited) healthy human CD34+HSPCs. 4 weeks post transplantation animals were treated with either isotype control antibody or ABTx135 (see Table 19). 24 hours after antibody dosing, a second transplant was performed with 1E+6 cells multiplex edited using the base editor ABE8.8 in combination with sgRNA CC128 (i.e., gRNA434) and sgRNA_015 (HBG1/2-114 edit). 10 weeks after the second transplant, the mice were sacrificed, and bone marrow was harvested. Table 19 provides details relating to mAb treatment and transplantation for the mouse groups. A part of the bulk bone marrow from each mouse group was subjected to genomic DNA isolation and subsequent next generation sequencing analysis. In addition, human CD15+, Human CD19+, and Lin-human CD34+, and GlyA+ cells were isolated from the bone marrow using flow assisted sorting. Genomic DNA was isolated from the sorted cells and was subjected to next generation sequencing. FIG. 53B shows levels of on-target editing in the sorted cell populations within the CD117 (top panel) and HBG1/2 (bottom panel) sites targeted for base editing. The mouse bone marrow was interrogated using flow cytometry to determine human engraftment and multi-lineage reconstitution. FIG. 53C show human CD45+ chimerism (top panel) and human Lin−CD34+ engraftment (bottom panel) within mouse bone marrow. FIG. 53D shows frequencies of unedited and CD117-edited cells within human Lin−CD34+CD117+ subsets within bone marrow. FIG. 53E shows levels of total CD117 receptor on the surface of human Lin−CD34+CD117+ cells, mAb-occupied CD117 receptor on the surface of unedited Lin−CD34+CD117+ cells, and free CD117 receptors within Lin−CD34+CD117+ cells. These data demonstrate the successful engraftment of the multiplex base edited HSCs in the mice previously treated using an anti-CD117 monoclonal antibody for conditioning.

TABLE 19
Transplant and dosing groups.

| | First | Second | |
|---|---|---|---|
| | transplant | transplant | mAb |
| Group | (“Host”) | (“Graft”) | treatment |
| 1 | Unedited | CD117/HBG1/2- | Isotype |
| | | Multiplex | |
| 2 | Unedited | CD117/HBG1/2- | mAb-7 |
| | | Multiplex | |

### Example 8: Engineering of Antibodies Suitable for Use in an Engineered Stem Cell Antibody-Paired Evasion (ESCAPE) Approach for Engraftment of Hematopoietic Stem Cells (HSCs)

[0814] Experiments were undertaken to identify antibodies suitable for use in the ESCAPE approach for engraftment of HSCs. As a first step to this end, the antibodies described in Table were expressed in Chinese hamster ovary (CHO) cells and purified to yield about 3 mg of each antibody from a 20 mL cell culture. A monomer purity of >95% was confirmed using SDS PAGE and SEC-HPLC. The antibodies were characterized as described below.

TABLE 20
Summary of antibody amino acid sequences.

| Antibody | Mutations relative to ABTx052 in the heavy chain variable region (VH) |
|---|---|
| Identifier | and light chain variable region (VL). |
| ABTx248 | ABTx052 VH-N104D_VH-E107D VL |
| ABTx249 | ABTx052 VL-F91L_VL-S93G_VH-N104D |
| ABTx250 | ABTx052 VH-R59K_VH-N104D VL |
| ABTx251 | ABTx052 VL-N92Y_VH-N104D |
| ABTx273 | ABTx052 VL-N92R_VH-N104D |
| ABTx252 | ABTx052 VL-Y94H_VH-N104D |
| ABTx253 | ABTx052 VL-N92S_VH-N104D |
| ABTx254 | ABTx052 VL-F91T_VL-Y94H_VH-R59K_VH-N104D_VH-E107D |
| ABTx255 | ABTx052 VL-F91V_VL-N92R_VH-R59K_VH-N104D |
| ABTx256 | ABTx052 VL-F91T_VL-N92Y_VH-N104D_VH-G105A |
| ABTx257 | ABTx052 VL-F91T_VH-R59K_VH-N104D_VH-G105A_VH-E107D |
| ABTx258 | ABTx052 VL-F91V_VL-N92R_VH-R59K_VH-N104D_VH-G105A |
| ABTx259 | ABTx052 VL-F91T_VL-N92R_VH-R59K_VH-N104D |
| ABTx260 | ABTx052 VL-F91V_VL-Y94H_VH-R59K_VH-N104D_VH-E107D |
| ABTx261 | ABTx052 VL-F91T_VL-N92R_VH-R59K_VH-N104D_VH-G105A |
| ABTx262 | ABTx052 VL-N92R_VL-Y94S_VH-N104D_VH-G105A |
| ABTx263 | ABTx052 VL-F91V_VL-N92Y_VH-R59K_VH-N104D_VH-E107D |
| ABTx264 | ABTx052 VL-F91T_VL-N92Y_VH-R59K_VH-N104D_VH-G105A |
| ABTx274 | ABTx052 VL-F91T_VH-R59K_VH-N104D |
| ABTx265 | ABTx052 VL-F91T_VL-N92R_VH-R59K_VH-N104D_VH-E107D |
| ABTx266 | ABTx052 VL-F91V_VL-N92R_VL-Y94H_VH-N104D_VH-G105A |
| ABTx267 | ABTx052 VL-F91T_VL-Y94S_VH-R59K_VH-N104D_VH-G105A_VH- |
| | E107D |
| ABTx268 | ABTx052 VL-F91V_VH-R59K_VH-N104D |
| ABTx269 | ABTx052 VL-F91V_VL-N92Y_VH-R59K_VH-N104D |
| ABTx270 | ABTx052 VL-F91V_VL-N92R_VH-N104D_VH-G105A |
| ABTx271 | ABTx052 VL-F91T_VH-N104D_VH-G105A_VH-E107D |
| ABTx272 | ABTx052 VL-F91V_VL-N92R_VH-R59K_VH-N104D_VH-E107D |

[0815] Experiments were undertaken to evaluate for each of the antibodies listed in Table 20 the binding affinity for wild-type CD117 (FIG. 55A), to the CC128 variant of CD117 (FIG. 55B), and to the CC200 variant of CD117 (FIG. 55C) (see also FIGS. 57A-57L). The CC200 and CC128 variants of CD117 were prepared by base editing cells using the guide CC200 or CC128, respectively, and an adenosine deaminase base editor (ABE). Binding affinities for ABTx052 were measured for comparison (FIG. 56). The measured antibody binding affinities are summarized in Table 21. Twelve (12) of the antibodies had strong binding affinity for wt CD117 and lower/same binding affinity to the CC128 and CC200 variants of CD117 (FIGS. 57A-57L).

TABLE 21
Summary of antibody binding affinities for wt
CD117 and the CD117 variants CC128 and CC200.

| | wt | | |
|---|---|---|---|
| Ab ID | CD117 | CC128 | CC200 |
| ABTx248 | Y | N | S |
| ABTx249 | Y | H | H |
| ABTx250 | Y | L | L |
| ABTx251 | Y | N | N |
| ABTx273 | Y | N | N |
| ABTx252 | N | L/N | L/N |
| ABTx253 | Y | L | S |
| ABTx254 | L/N | L/N | L/N |
| ABTx255 | L/N | L/N | L/N |
| ABTx256 | Y | N | N |
| ABTx257 | Y/L | L | L |
| ABTx258 | L/N | N | N |
| ABTx259 | L/N | N | N |
| ABTx260 | L/N | N | N |
| ABTx261 | L/N | N | N |
| ABTx262 | L/N | N | N |
| ABTx263 | L/N | N | N |
| ABTx264 | L/N | N | N |
| ABTx274 | Y | L | L |
| ABTx265 | Y | N | N |
| ABTx266 | L/N | L | L |
| ABTx267 | L/N | N | N |
| ABTx268 | Y | N | N |
| ABTx269 | L/N | N | N |
| ABTx270 | Y | N | N |
| ABTx271 | Y | L | S |
| ABTx272 | Y | N | N |
| ABTx052 | Y | L | L |

“N” indicates no binding, “Y” indicates binding, “H” indicates high binding, “L” indicates low binding, “S” indicates strong binding, and “L/N” indicates low-to-no binding.

[0816] Experiments were undertaken to quantify the wild-type CD117 binding kinetics for the following antibodies: ABTx052, ABTx248, ABTx253, and ABTx271 (FIGS. 58A-58D). Table 22 provides a quantitative summary of the binding observed for each of the antibodies. Each of ABTx248, ABTx253, and ABTx271 had lower KDs compared to ABTx052.

TABLE 22
Summary of binding of the indicated
ABTx052 variants to wild-type CD117.

| | K_{D} | kₐ | k_{dis} | Full |
|---|---|---|---|---|
| | (M) | (1/Ms) | (1/s) | R\hat{ }2 |
| ABTx052 | 7.22E−09 | 2.28E+05 | 1.65E−03 | 0.9963 |
| ABTx248 | 1.53E−08 | 2.83E+05 | 4.32E−03 | 0.991 |
| ABTx253 | 1.31E−08 | 3.12E+05 | 4.08E−03 | 0.9899 |
| ABTx271 | 9.53E−09 | 2.46E+05 | 2.34E−03 | 0.9961 |

[0817] Experiments were undertaken to determine EC50 (50% effective concentration) values on M07e cells for each of the following antibodies: ABTx052, ABTx248, ABTx253, and ABTx271 (FIG. 59 and Table 23). Each of ABTx248, ABTx253, and ABTx271 had a lower EC50 value than ABTx052 on M07e cells.

TABLE 23
EC₅₀ values for the indicated antibodies on M07e cells.

| Ab ID | EC₅₀ (nM) |
|---|---|
| ABTx052 | 0.1256 |
| ABTx248 | 0.0541 |
| ABTx253 | 0.0529 |
| ABTx271 | 0.0836 |

[0818] Experiments were then undertaken to calculate melting temperatures (Tms) for each of the following antibodies: ABTx052, ABTx248, ABTx253, and ABTx271 (FIG. 60 and Table 24). The antibodies ABTx248, ABTx253, and ABTx271 each had melting temperatures that were comparable to those of ABTx052 (Table 24).

TABLE 24
Tms values for the indicated antibodies.

| Ab ID | Tm1(° C.) | Tm2 (° C.) |
|---|---|---|
| ABTx052 | 69.96 | 80.58 |
| ABTx248 | 69.82 | 78.81 |
| ABTx253 | 69.67 | 79.26 |
| ABTx271 | 75.86 | |

[0819] The polyspecificity of ABTx248, ABTx253, and ABTx271 was evaluated (FIG. 61) and it was determined that each of the antibodies had low polyspecificity.

[0820] An experiment was undertaken to determine the viability of hematopoietic stem cells (HSCs) treated with increasing concentrations of the antibodies ABTx167, ABTx248, ABTx135, ABTx253, and ABTx271 (FIG. 62 and Table 25). Each of the antibodies had IC50 values that were similar to or lower than that for ABTx052 (Table 25).

TABLE 25
Summary of IC50 values for the indicated antibodies when
used to treat unedited hematopoietic stem cells in vitro.

| Samples | Background | IC50 [M] |
|---|---|---|
| ABTx052 | — | 1.138e−006 |
| ABTx135 | ABTx052_LALADA | 5.337e−007 |
| ABTx167 | ABTx052_LALADA_YTE | 2.556e−007 |
| ABTx248 | ABTx052 mutant | 4.313e−006 |
| ABTx253 | ABTx052 mutant | 2.210e−006 |
| ABTx271 | ABTx052 mutant | 1.640e−006 |

### Example 9: Transplant of Multiplex Base Edited Hematopoietic Stem Cells (HSCs) into Humanized NBSGW Mice

[0821] Experiments were undertaken to demonstrate the engraftment of base edited hematopoietic stem cells (HSCs) in mice previously treated with an anti-CD117 monoclonal antibody. As shown in FIG. 63, NBSGW mice were treated according to either “Dosing Paradigm A” or “Dosing Paradigm B.” In each dosing paradigm, mice were first transplanted with 1e6 wild type (unedited) healthy human CD34+HSPCs. 4 weeks post transplantation the mice were treated with either isotype control antibody or ABTx135 (see Tables 26 and 27). 2 weeks (Dosing Paradigm A) or 24 hours (Dosing Paradigm B) after antibody dosing, a second transplant was performed with 1E+6 cells multiplex edited using the base editor ABE8.8 in combination with sgRNA CC128 (i.e., gRNA434; “CD117 edit cells”) and sgRNA_015 (“HBG1/2 edit cells”). Mice were sacrificed at the time points indicated in Tables 26 and 27, and bone marrow was harvested and one or more of the following was evaluated: A) base editing in the cells, as determined using next-generation sequencing (NGS); B) chimerism, C) immune cell immunophenotypes; D) receptor occupancy (RO); E) globin. Tables 26 and 27 provide details relating to mAb treatment and transplantation for the mouse groups. As controls, mice were administered an isotype antibody that did not bind wild type CD117 and/or the mice were administered cells that were only base edited using the base editor ABE8.8 in combination with only the guide sgRNA_015 (“HBG1/2 edit cells”).

TABLE 26
Description of groups of mice treated according
“Dosing Paradigm A” (see FIG. 63).

| | Cells (1e6/mouse) | | | | |
|---|---|---|---|---|---|
| | Administered ~4 | | | | |
| | wks After Administration | | | | |
| | of 1e6 wild type | | Take Down | | |
| | (unedited) healthy | Antibody | (TD) | TD | TD |
| Group | human CD34+ HSPCs | Administered | (0 wk) | (2 wk) | (12 wk) |
| 1 | HBG1/2 edit | Isotype | N = 5 | N = 2 | N = 5 |
| 2 | HBG1/2 edit | ABTx135 | | N = 2 | N = 5 |
| 3 | HBG1/2 edit + CD117 edit | Isotype | | N = 3 | N = 5 |
| 4 | HBG1/2 edit + CD117 edit | ABTx135 | | N = 3 | N = 5 |

“HBG1/2 edit” indicates that the cells were edited using the base editor ABE8.8 in combination with sgRNA_015, and “CD117 edit” indicates that the cells were edited using the base editor ABE8.8 in combination with sgRNA CC128 (gRNA434).

TABLE 27
Description of groups of mice treated according to
“Dosing Paradigm B” (see FIG. 63).

| | Cells (1e6/mouse) | | | | |
|---|---|---|---|---|---|
| | Administered ~4 | | | | |
| | wks After Administration | | | | |
| | of 1e6 wild type | | Take Down | | |
| | (unedited) healthy | Antibody | (TD) | TD | TD |
| Group | human CD34+ HSPCs | Administered | (0 wk) | (10 wk) | (12 wk) |
| 1 | HBG1/2 edit | Isotype | N = 0 | N = 5 | N = 5 |
| 2 | HBG1/2 edit | ABTx135 | | N = 5 | N = 5 |
| 3 | HBG1/2 edit + CD117 edit | Isotype | | N = 5 | N = 5 |
| 4 | HBG1/2 edit + CD117 edit | ABTx135 | | N = 5 | N = 5 |

“HBG1/2 edit” indicates that the cells were edited using the base editor ABE8.8 in combination with sgRNA_015, and “CD117 edit” indicates that the cells were edited using the base editor ABE8.8 in combination with sgRNA CC128 (gRNA434).

[0822] Analysis of immune cells in mice treated according to Dosing Paradigm A at two weeks following administration of the monoclonal antibody confirmed that administration of the antibody led to reductions in myeloid (CD15+) and erythrocyte (GlyA) cells in the mice (FIGS. 64A-64G). This confirmed that the antibody can be used as a way to deplete a bone marrow niche to facilitate engraftment of the cleared niche by a hematopoietic stem cell transplant.

[0823] At 10 weeks post administration of base edited CD34+HSPCS to mice treated according to Dosing Paradigm B, a part of the bulk bone marrow from each mouse group was characterized. First, human CD15+, Human CD19+, and Lin-human CD34+, and GlyA+ cells were isolated from the bone marrow using flow assisted sorting at 10 weeks following administration of the monoclonal antibodies. Genomic DNA was isolated from the sorted cells and was subjected to next generation sequencing. FIGS. 65A and 65B show levels of on-target editing in the sorted cell populations within the CD117 (FIG. 65A) and HBG1/2 (FIG. 65B) sites targeted for base editing. Levels of target base editing was highest in cells collected from mice administered the “HBG1/2 edit+CD117 edit” cells post monoclonal antibody treatment using ABTx135. The mouse bone marrow was also interrogated using flow cytometry to confirm cell engraftment and multi-lineage reconstitution. FIGS. 66A-66C show human CD45+ chimerism (FIG. 66A), human Lin−CD34+ engraftment (FIG. 66B), and CD34+ engraftment (FIG. 66C) within mouse bone marrow. Frequencies of HSPCs and hematopoietic stem cells were comparable between isotype antibody treated mice administered cells with the HBG1/2 edit or with cells containing both the HBG1/2 edit and the CD117 edit. Administration of ABTx134 resulted in lower frequencies of CD34+ and Lin(−)CD34+ cells in mice that received only HBG1/2 edit cells (Group 2 in Table 27). Frequencies of CD34+ and Lin(−)CD34+ cells were higher in ABTx135-treated mice that were transplanted with HBG1/2 edit+CD117 edit cells (Group 4 in Table 27). Frequencies of CD19+, CD15+, GlyA+, and CD33+ cell populations were comparable between isotype antibody-treated groups engrafted with HBG1/2 edit cells or HBG1/2 edit+CD117 edit cells (FIGS. 67A-67D, Groups 1B and 3B). Administration of the ABTx135 monoclonal antibody (Groups 2 and 4) to the mice resulted in lower frequencies of GlyA+, CD33+, and CD15+ cells as compared to mice administered only the isotype antibody, and CD15+ and CD33+ cells were observed at higher frequencies in mice transplanted with HBG1/2 edit+CD117 edit cells. Levels of cells surface expressing wild type or edited CD117 expressed by cells containing the CD117 edit was also determined using flow cytometry. The cells were contacted ex vivo with a saturating dose of ABTx135, detected by anti-IgG-PE, which allowed for discrimination between wild type CD117 cells capable of binding ABTx135/1gG-PE and CD117 edit cells, which escaped ABTx135 binding. Mice administered HBG1/2 edit+CD117 edit cells contained the highest levels of cells surface-expressing edited CD117 polypeptides (i.e., CD117 polypeptides expressed by CD117 edit cells) (FIG. 68).

[0824] It was determined that both Dosing Paradigm A and Dosing Paradigm B yielded similar results in terms of, for example, engraftment and multi-lineage reconstitution.

[0825] The above results demonstrate that a single dose of an anti-CD117 monoclonal antibody can be used as a successful strategy for clearing a bone marrow niche to allow for engraftment in a subject of cells base edited to express a CD117 polypeptide that is not bound by or that only weakly binds the anti-CD117 monoclonal antibody.

### Example 10: Transplant of Base Edited Hematopoietic Stem Cells (HSCs) into NSG-SGM3 Mice Expressing Human Stem Cell Factor

[0826] Since the above in vivo engraftment experiments used mice expressing a mouse stem cell factor (SCF), experiments were undertaken to demonstrate improved engraftment of base edited hematopoietic stem cells (HSCs) in mice expressing a human stem cell factor. The mice were not previously humanized (i.e., transplanted with 1e6 wild type (unedited) healthy human CD34+HSPCs). As shown in FIG. 69, NSG-SGM3 mice, which express a human stem cell factor, were treated according to the protocol described in FIG. 69 and in Table 28 below. Endpoint readouts included the following: immunophenotyping using flow cytometry and a combined antibody panel (FIGS. 71A-71F); and next-generation sequencing to characterize base editing detected in bulk bone marrow (BM) (FIGS. 70A-70C). It was found that the cells administered to the mice demonstrated high levels of engraftment as well as multilineage reconstitution at 4 weeks following administration of the human CD34+ cell transplants. Engraftment and frequencies of measured cell populations were comparable between edited and unedited cells (FIGS. 71A-71F). The results also demonstrated higher levels of engraftment in the mice expressing the human stem cell factor (hSCF) as compared to mice expressing only the mouse stem cell factor (mSCF), thereby showing that levels of engraftment of cells expressing an edited CD117 polypeptide previously observed in mice were lower than would have been the case if the mice expressed a human SCF (compare, for example, FIG. 66A, Group 4 with FIG. 70A “CC128 Multiplex.”

TABLE 69
Description of groups of mice treated (see FIG. 69).

| | | | mAb | | | |
|---|---|---|---|---|---|---|
| | Cells Administered (1e6 | | Dose | N | N | N |
| Group | cells/mouse) | mAb | (mg/kg) | (0 w) | (2 w) | (12 w) |
| 1 | Unedited | No mAb | 0 | 5 | 5 | 5 |
| 2 | Unedited:HBG1/2 edit + CC128 | Isotype | 20 | 5 | 5 | 5 |
| | edit (CC128 Multiplex) | | | | | |
| 3 | HBG1/2 edit + CC128 edit | No mAb | 0 | 5 | 5 | 5 |
| | (CC128 Multiplex) | | | | | |
| 4 | CC200 edit (CC200 singleplex) | No mAb | 0 | 5 | 5 | 5 |

“HBG1/2 edit” indicates that the cells were edited using the base editor ABE8.8 in combination with sgRNA_015, “CC128 edit” indicates that the cells were edited using the base editor ABE8.8 in combination with sgRNA CC128 (gRNA434), and “CC200” indicates that the cells were edited using the base editor ABE8.20-NRCH, ABE9v1, or ABE9v2 in combination with sgRNA CC200 (gRNA931). The term “Unedited:HBG1/2 edit + CC128 edit (CC128 Multiplex)” indicates that the mice were administered a 1-to-1 mix of unedited cells and multiplex base edited cells (i.e., HBG1/2 edit + CC128 edit cells).

### Example 11: Affinity Maturation of Anti-CD117 Antibodies

[0827] Experiments were undertaken to use a yeast display platform available from the company “Curia” for the affinity maturation of the monoclonal antibody ABTx025. ABTx025 had specific binding for wild type CD117, was cross-reactive with cyno CD117, and blocked binding of stem cell factor (SCF) to CD117. The objective of the experiments was to identify affinity matured antibodies with improved affinity for wild type human CD117 (hu-cKIT) and low-to-no binding to CC128 CD117 (cKIT) variants. The CC128 CD117 variants corresponded to those CD117 polypeptides expressed from variants of polynucleotides encoding wild type CD117 prepared through base edited thereof using the base editor ABE8.8 in combination with the guide polynucleotide sgRNA_015. The affinity maturation involved generating random mutants of ABTx025 followed by negative selection and counter screening against the CC128 CD117 variant. Eleven (11) unique variants of ABTx025 were identified using the yeast display platform.

[0828] The 11 IgG1 variants of ABTx025 identified using the yeast display platform were expressed in Chinese hamster ovary (CHO) cells, purified (see Table 70), and characterized. The following properties of the antibodies were characterized: 1) wild type CD117 and CC128 CD117 variant binding including monovalent KD measurement (Table 71); Tm as determined by differential scanning fluorimetry (DSF) (FIGS. 74A and 74B and Table 72); polyspecificity; EC50 on M07e cells (FIGS. 76A and 76B and Table 73); and stem cell factor (SCF) blocking (FIG. 77). Most of the 11 variants showed improved binding affinity to wild type CD117 and showed no binding to the CC128 variant of CD117 (FIGS. 72A and 72B), and many of the variants showed slow off rates for binding (FIGS. 73A-73E). Seven of the eleven variants of ABTx025 had comparable monovalent KD values as compared to ABTx052 (Table 71). All of the 11 variants had low polyspecificity (FIG. 75). Most of the variants had high melting temperatures (FIGS. 74A and 74B, and Table 72). The variants ABTx196 and ABTx198 were able to efficiently deplete human CD34+ hematopoietic stem and progenitor cells (HSPCs) with efficiencies comparable to the monoclonal antibody ABTx135 (FIG. 77 and Table 74). Table 75 provides a summary of the characterization of the eleven (11) variants.

TABLE 70
Purity of antibodies obtained from CHO cells. The
antibodies were produced as human IgG1 format.

| | | Purity | Purity | | |
|---|---|---|---|---|---|
| | Concen- | determined | determined | | |
| Antibody | tration | by SDS- | by SEC- | Endotoxin | Total |
| ID | (mg/ml) | PAGE(%) | HPLC(%) | (EU/mg) | (mg) |
| ABTx196 | 1.65 | ≥95 | 97 | ≤0.1 | 2.8 |
| ABTx197 | 1.38 | ≥95 | 97 | ≤0.1 | 2.48 |
| ABTx198 | 1.22 | ≥80 | 93 | ≤0.1 | 2.19 |
| ABTx199 | 2.04 | ≥90 | 96 | ≤0.1 | 3.67 |
| ABTx200 | 2.03 | ≥95 | 94 | ≤0.1 | 3.65 |
| ABTx201 | 1.15 | ≥95 | 97 | ≤0.1 | 1.95 |
| ABTx202 | 1.71 | ≥95 | 98 | ≤0.1 | 3.07 |
| ABTx203 | 0.96 | ≥95 | 98 | ≤0.1 | 1.72 |
| ABTx204 | 1.07 | ≥95 | 97 | ≤0.1 | 1.92 |
| ABTx205 | 1.69 | ≥95 | 82 | ≤0.1 | 2.87 |
| ABTx206 | 1.83 | ≥75 | 89 | ≤0.1 | 3.29 |

TABLE 71
KD values.

| Antibody | KD | ka | kdis | Full | Full |
|---|---|---|---|---|---|
| ID | (M) | (1/Ms) | (1/s) | X\hat{ }2 | R\hat{ }2 |
| ABTx196 | 8.18E−09 | 8.44E+04 | 6.91E−04 | 6.1357 | 0.9912 |
| ABTx197 | 2.93E−08 | 5.94E+04 | 1.74E−03 | 4.011 | 0.9864 |
| ABTx198 | 1.20E−09 | 7.28E+04 | 8.74E−05 | 1.4725 | 0.9979 |
| ABTx199 | 8.70E−09 | 7.28E+04 | 6.33E−04 | 1.618 | 0.9964 |
| ABTx200 | 2.57E−08 | 6.36E+04 | 1.64E−03 | 0.5891 | 0.9982 |
| ABTx201 | 3.46E−08 | 1.27E+05 | 4.41E−03 | 2.3177 | 0.9911 |
| ABTx202 | 2.42E−09 | 5.78E+04 | 1.40E−04 | 0.9935 | 0.9978 |
| ABTx203 | 6.62E−09 | 9.71E+04 | 6.43E−04 | 1.0487 | 0.9985 |
| ABTx204 | 1.17E−08 | 8.44E+04 | 6.91E−04 | 2.3487 | 0.9941 |
| ABTx205 | 2.07E−09 | 5.66E+04 | 1.17E−04 | 2.1499 | 0.9956 |
| ABTx206 | 1.26E−09 | 4.03E+04 | 5.07E−05 | 1.3438 | 0.9962 |
| ABTx025 | 1.47E−06 | 3.72E+04 | 5.09E−02 | 1.2024 | 0.9169 |
| ABTx052 | 8.05E−09 | 3.07E+05 | 2.47E−03 | 4.7577 | 0.992 |

TABLE 72
Melting temperatures (Tms). The “control” sample
was provided with a kit used to measure melting temperatures,
and “C + L” indicates “control plus ligand.”

| Antibody ID | Tm1 | Tm2 |
|---|---|---|
| ABTx025 | 69.88 | |
| ABTx196 | 67.08 | |
| ABTx197 | 66.63 | |
| ABTx198 | 59.99 | 70.33 |
| ABTx199 | 69.29 | |
| ABTx200 | 64.12 | |
| ABTx201 | 71.06 | |
| ABTx202 | 69.74 | |
| ABTx203 | 65.6 | |
| ABTx204 | 72.39 | |
| ABTx205 | 70.18 | |
| ABTx206 | 70.18 | |
| ABTx052 | 69.88 | 80.37 |
| control | 49.65 | |
| C + L | 52.75 | |

TABLE 73
EC50 on M07e cells.

| Antibody ID | EC50 (nM) |
|---|---|
| ABTx196 | 5.215 |
| ABTx198 | 5.425 |
| ABTx199 | 9.978 |
| ABTx202 | 7.977 |
| ABTx203 | 5.56 |
| ABTx205 | 7.48 |
| ABTx206 | 14.15 |

TABLE 74
IC50 values.

| Antibody ID | IC50 (M) | R squared |
|---|---|---|
| ABTx196 | 1.30E−05 | 0.7431 |
| ABTx198 | 3.59E−06 | 0.8425 |
| ABTx135 | 1.36E−06 | 0.8672 |

TABLE 75
Summary of characterization of variants
of the monoclonal antibody ABTx025.

| | KD | Tm | | |
|---|---|---|---|---|
| Ab ID | (M) | (° C.) | BVP | EC50(nM) |
| ABTx196 | 8.18E−09 | 69.88 | Low | 5.215 |
| ABTx197 | 2.93E−08 | 67.08 | Low | 5.425 |
| ABTx198 | 1.20E−09 | 66.63 | Low | 5.425 |
| ABTx199 | 8.70E−09 | 59.99 | Low | 9.978 |
| ABTx200 | 2.57E−08 | 69.29 | Low | |
| ABTx201 | 3.46E−08 | 64.12 | Low | |
| ABTx202 | 2.42E−09 | 71.06 | Low | 7.977 |
| ABTx203 | 6.62E−09 | 69.74 | Low | 5.56 |
| ABTx204 | 1.17E−08 | 65.6 | Low | |
| ABTx205 | 2.07E−09 | 72.39 | Low | 7.48 |
| ABTx206 | 1.26E−09 | 70.18 | Low | 14.15 |
| ABTx025 | 1.47E−06 | 70.18 | Low | NS |
| ABTx052 | 8.05E−09 | 69.88 | Low | 0.17 |

### Example 12: Anti-CD117 Antibodies with Modified Fc Domains

[0829] IgG1 antibodies targeting CD117 can cause mast cell degranulation, which can result from Fcγ receptor interactions. Accordingly, it can be advantageous to modify the Fc domain of anti-CD117 antibodies include one or more amino acid residue alterations in an Fc domain to reduce or eliminate binding to FcγR, binding to FcRn, and/or mast cell activation. Therefore, variants of the antibodies ABTx307, ABTx308, ABTx309, were prepared to have Fc domains containing the alterations L234A, L235A, and D265A (LALADA); where the amino acid positions are referenced to the following amino acid sequence: SGAAVKKPGESLKISCKGSGYRFTSYWIGWVRQMPGKGLEWMGIIYPGDSDTRYSPSFQGQVTI SAGKSISTAYLOWSSLKASDTAMYYCARHGRGYNGYEGAFDIWGQGTMVTVSSASTKGPSVFPL APSSKSTSGGTAALGCLVKDYFPEPVTVSWNSGALTSGVHTFPAVLOSSGLYSLSSVVTVPSSS LGTQTYICNVNHKPSNTKVDKKVEPKSCDKTHTCPPCPAPELLGGPSVFLFPPKPKDTLMISRT PEVTCVVVDVSHEDPEVKFNWYVDGVEVHNAKTKPREEQYNSTYRVVSVLTVLHQDWLNGKEYK CKVSNKALPAPIEKTISKAKGQPREPQVYTLPPSRDELTKNQVSLTCLVKGFYPSDIAVEWESN GQPENNYKTTPPVLDSDGSFFLYSKLTVDKSRWQQGNVFSCSVMHEALHNHYTQKSLSLSPG (positions 7-1101 of SEQ ID NO: 419). Further, the antibody ABTx313 was prepared, which contained the amino acid alterations N104D and E107D in the heavy chain (i.e., in CDR3) and the alterations N92S in the light chain (i.e., in CDR3), where the alterations are relative to the heavy chain and light chains of the antibody ABTx052 (SEQ ID NOs: 419 and 420, respectively), together with an Fc domain containing the LALADA alteration. The antibodies were expressed in host cells, purified, and characterized.

[0830] The ABTx307, ABTx308, ABTx309, and ABTx313 antibodies were expressed in an Expi 293 cell line, purified (FIGS. 78A-78D and 79), and characterized. The following properties of the antibodies were characterized: 1) Tm as determined by differential scanning fluorimetry (DSF) (FIGS. 80A and 80B and Table 76); 2) polyspecificity (FIGS. 81A and 81B); 3) KD for monovalent binding to CD117 (FIGS. 82A-82E and Table 77); 4) binding to CC128 and CD117 (FIGS. 83A-83E, 84, 85, 86A-86D, and Table 78); 5) EC50 on M07e cells (FIGS. 87A and 87B and Table 79); and 6) stem cell factor blocking (FIG. 88 and Table 80). The antibodies all had similar melting temperatures as ABTx135 (FIGS. 80A and 80B and Table 76). All of the antibodies had lower polyspecificity than ABTx135 (FIGS. 81A and 81B). ABTx308 had very low binding to CC128 (FIG. 85). Each of ABTx307, ABTx308, ABTx309, and ABTx313 had lower binding to CC128 than ABTx135 (FIGS. 86A-86D). ABTx052 and ABTx135 showed similar capacity to block SCF binding to human CD34+HSPCs at day 5 (FIG. 88). ABTx309 and ABTx307 showed IC50s for blocking SCF binding that were similar to ABTx135 and ABTx052, and ABTx313 had an IC50 for blocking SCF binding that was similar to ABTx168. Most of the monoclonal antibodies showed similar capacity for depleting human CD34+HSPCs (FIG. 88).

TABLE 76
Melting temperatures. The “control” sample
was provided with a kit used to measure melting
temperatures, and “C + L” indicates “control plus ligand.”

| Antibody ID | Tm1 | Tm2 |
|---|---|---|
| ABTx307 | 66.33 | 79.03 |
| ABTx308 | 66.48 | 76.67 |
| ABTx309 | 66.19 | 75.79 |
| ABTx313 | 66.33 | 79.03 |
| ABTx135 | 66.19 | 80.66 |
| control | 44.33 | 52.75 |
| C + L | 49.5 | |

TABLE 77
KD measurements.

| Antibody | KD | ka | kdis | Full | Full |
|---|---|---|---|---|---|
| ID | (M) | (1/Ms) | (1/s) | X\hat{ }2 | R\hat{ }2 |
| ABTx307 | 7.60E−09 | 1.57E+06 | 1.19E−02 | 2.0101 | 0.9843 |
| ABTx308 | 8.48E−09 | 1.95E+06 | 1.66E−02 | 1.0109 | 0.9863 |
| ABTx309 | 5.52E−09 | 1.47E+06 | 8.14E−03 | 2.0163 | 0.9864 |
| ABTx313 | 7.35E−09 | 1.62E+06 | 1.19E−02 | 1.8706 | 0.9846 |
| ABTx135 | 5.60E−09 | 1.63E+06 | 9.11E−03 | 1.3612 | 0.9907 |

TABLE 78
Binding to CC128.

| Antibody ID | R Max | kD | Ka | Koff | X\hat{ }2 | R\hat{ }2 |
|---|---|---|---|---|---|---|
| ABTx307 | 0.4941 | 5.11E−09 | 9.38E+06 | 4.80E−02 | 5.5661 | 0.9299 |
| ABTx308 | 0.2023 | 7.49E−09 | 8.96E+06 | 6.71E−02 | 0.9248 | 0.9248 |
| ABTx309 | 0.8522 | 4.67E−09 | 1.54E+07 | 7.20E−02 | 19.177 | 0.93 |
| ABTx313 | 0.383 | 9.61E−08 | 4.41E+06 | 4.24E−01 | 1.3928 | 0.9749 |
| ABTx135 | 0.5211 | 2.66E−08 | 1.59E+06 | 4.24E−02 | 1.7782 | 0.977 |

TABLE 79
EC50 on M07e cells expressing wild type CD117 and
M07e cells expressing a CC128 variant of CD117.

| Antibody ID | EC50 (nM) |
|---|---|
| ABTx307 | 0.1881 |
| ABTx308 | 0.3981 |
| ABTx309 | 0.1681 |
| ABTx313 | 0.1193 |
| ABTx135 | 0.1536 |

TABLE 80
IC50 (Inhibitory Concentration 50%) values for
the monoclonal antibodies on CD34+ HSPCs.

| | ABTx168 | ABTx309 | ABTx313 | ABTx307 | ABTx308 | ABTx052 | ABTx135 |
|---|---|---|---|---|---|---|---|
| IC50 | 4.56E−06 | 1.33E−07 | 4.37E−06 | 9.95E−07 | 8.05E−05 | 7.70E−07 | 9.27E−07 |
| R2 | 0.9387 | 0.8949 | 0.8826 | 0.895 | 0.6752 | 0.9423 | 0.92 |

[0831] The following methods were employed in the above examples.

### General HEK293T Mammalian Culture Conditions

[0832] Cells were cultured at 37° C. with 5% CO₂. HEK293T cells [CLBTx013, American Type Cell Culture Collection (ATCC)] were cultured in Dulbecco's modified Eagles medium plus Glutamax (10566-016, Thermo Fisher Scientific) with 10% (v/v) fetal bovine serum (A31606-02, Thermo Fisher Scientific). Cells were tested negative for mycoplasma after receipt from supplier.

mRNA Production for ABE Editors Used in CD34+ Cells

[0833] Editors were cloned into a plasmid encoding a dT7 promoter followed by a 5′UTR, Kozak sequence, ORF, and 3′UTR. The dT7 promoter carries an inactivating point mutation within the T7 promoter that prevents transcription from circular plasmid. This plasmid templated a PCR reaction (Q5 Hot Start 2X Master Mix), in which the forward primer corrected the SNP within the T7 promoter, and the reverse primer appended a 120A tail to the 3′ UTR. The resulting PCR product was purified on a Zymo Research 25 μg DCC column and used as mRNA template in the subsequent in vitro transcription. The NEB HiScribe High-Yield Kit was used as per the instruction manual but with full substitution of N1-methyl-pseudouridine for uridine and co-transcriptional capping with CleanCap AG (Trilink). Reaction cleanup was performed by lithium chloride precipitation. Primers used for amplification can be found in Table 26.

TABLE 81
Primers used for ABE8 T7 in vitro transcription reactions

| Name | Sequence |
|---|---|
| fwd_IVT | TCGAGCTCGGTACCTAATACGACTCAC (SEQ ID NO: 936) |
| rev_IVT | TTTTTTTTTTTTTTTTTTTTTTTTTTTTTTTTTTTTTTTTTTTTTTTTTTTTTT |
| | TTTTTTTTTTTTTTTTTTTTTTTTTTTTTTTTTTTTTTTTTTTTTTTTTTTTTT |
| | TTTTTTTTTTTTCTTCCTACTCAGGCTTTATTCAAAGACCA (SEQ ID NO: 937) |

### CD34+ Cell Preparation

[0834] Mobilized peripheral blood was obtained and enriched for Human CD34+HSPCs (HemaCare, M001F-GCSF/MOZ-2). The CD34+ cells were thawed and put into X-VIVO 10 (Lonza) containing 1% Glutamax (Gibco), 100 ng/ml of TPO (Peprotech), SCF (Peprotech) and Flt-3 (Peprotech) at 48 hours prior to electroporation.

### Electroporation of CD34+ Cells

[0835] 48 hours post thaw, the cells were spun down to remove the X-VIVO 10 media and washed in MaxCyte buffer (HyClone) with 0.1% HSA (Akron Biotechnologies). The cells were then resuspended in cold MaxCyte buffer at 1,250,000 cells per mL and split into multiple 20 μL aliquots. ABE mRNA and guide polynucleotides were then aliquoted as per the experimental conditions and raised to a total of 5 μL in MaxCyte buffer. The 20 μL of cells was the added into the 5 μL RNA mixture in groups of 3 and loaded into each chamber of an OC25x3 MaxCyte cuvette for electroporation. After receiving the charge, 25 μL was collected from the chambers and placed in the center of the wells in a 24-well untreated culture plate. The cells recovered for 20 minutes in an incubator (37° C., 5% CO₂). After the 20 minutes recovery, X-VIVO 10 (a hematopoietic cell medium) containing 1% Glutamax, 100 ng/ml of TPO, SCF and Flt-3 was added to the cells for a concentration of 1,000,000 cells per mL. The cells were then left to further recover in an incubator (37° C., 5% CO₂) for 48 hrs.

### Genomic DNA Extraction for CD34+ Cells

[0836] Following ABE electroporation (48 h later), an aliquot of cells was cultured in X-VIVO media (Lonza) containing 1% Glutamax (Gibco), 100 ng/ml of TPO (Peprotech), SCF (Peprotech) and Flt-3 (Peprotech). Following 48 h and 144 h post culturing, 100,000 cells were collected and spun down. 50 μL of Quick Extract (Lucigen) was added to the cell pellet and the cell mixture was transferred to a 96-well PCR plate (Bio-Rad). The lysate was heated for 15 minutes at 65° C. followed by 10 minutes at 98° C. The cell lysates were stored at −20° C.

### Polyspecificity

[0837] Some antibodies specifically or non-specifically bind more than one antigen, and this binding to multiple different antigens is referred to as “polyspecificity.” One potential reason for fast clearance of an antibody from the body of a subject is polyspecificity of the antibody. An ELISA assay for non-specific binding of antibodies to baculovirus particles (BVPs) can be used to determine polyspecificity of an antibody, and results from the assay are known to correlate with fast in vivo clearance of the antibodies. Accordingly, polyspecificity of antibodies of the disclosure was measured by using an ELISA assay to determine binding to BVP. In the assay, 1:1000, 1:10000, and 1:100000 dilutions of BVP in 50 mM sodium carbonate (pH 9.6) were indubated in wells surface-treated to bind the BVP for 16-24 hr at 4° C. Following the incubation, unbound BVP was removed from the wells and the wells were then incubated for 1 hr at room temperature with a blocking buffer (PBS containing 1% bovine serum albumin (BSA)) followed by three washes with PBST (phosphate-buffered saline with Tween 20). Antibodies to be characterized were then added to the wells as primary antibodies in 1:3 serial dilutions (˜1 μM undiluted antibody concentrations) and incubated for 1 hour at room temperature. The wells were again washed in PBST and anti-Human-IgG-HRP (horseradish peroxidase) was then added to the wells as a secondary antibody and incubated for 1 hr at room temperature. The wells were then washed 6 times using PBST followed by the addition of the HRP substrate 3,3′,5,5′-Tetramethylbenzidine (TMB). The reaction was stopped by adding 2M sulfuric acid to the wells and absorbance was then read at 450 nm. A “BVP score” was then calculated by normalizing absorbance to control wells that were not contacted with any primary antibody. For primary antibody serial diultion results, GraphPad Prism 9 was used to determine EC50.

### Other Embodiments

[0838] From the foregoing description, it will be apparent that variations and modifications may be made to the embodiments of the disclosure described herein to adopt it to various usages and conditions. Such embodiments are also within the scope of the following claims.

[0839] The recitation of a listing of elements in any definition of a variable herein includes definitions of that variable as any single element or combination (or subcombination) of listed elements. The recitation of an embodiment herein includes that embodiment as any single embodiment or in combination with any other embodiments or portions thereof.

[0840] All patents and publications mentioned in this specification are herein incorporated by reference to the same extent as if each independent patent and publication was specifically and individually indicated to be incorporated by reference.

What is claimed:

1. A method for hematopoietic stem cell transplantation in a subject, the method comprising:
(a) contacting an isolated hematopoietic stem cell or progenitor thereof with a guide polynucleotide and a base editor comprising a nucleic acid programmable DNA binding protein (napDNAbp) and an adenosine deaminase domain or a polynucleotide encoding the base editor, wherein the guide polynucleotide targets a nucleic acid molecule encoding a CD117 polypeptide, thereby generating an edited cell;
(b) administering the edited cell to the subject; and
(c) administering to the subject an antibody or antigen binding fragment thereof, wherein the antibody is selected from the group consisting of ABTx025, ABTx030, ABTx052, ABTx061, ABTx062, ABTx070, ABTx071, ABTx196, ABTx198, ABTx202, ABTx203, ABTx205, ABTx206, ABTx248, ABTx250, ABTx251, ABTx253, ABTx254, ABTx255, ABTx256, ABTx265, ABTx268, ABTx270, ABTx271, ABTx272, ABTx273, ABTx274, ABTx307, ABTx308, ABTx309, and ABTx313.

2. The method of claim 1, wherein in step (a) generating an edited cell comprises
i) introducing an alteration of a nucleobase in a codon encoding a serine at amino acid position 261, wherein the alteration of the nucleobase encoding the serine at amino acid position 261 results in the codon expressing a glycine,
ii) introducing an alteration of a nucleobase in a codon encoding a serine at amino acid position 251, and/or
iii) introducing an alteration of a nucleobase in a codon encoding an asparagine at amino acid position 260 and introducing an alteration of a nucleobase in a codon encoding a serine at amino acid position 261, or corresponding positions in another CD117 polypeptide, and generating an edited cell;

3. The method of claim 1, wherein the adenosine deaminase domain comprises a combination of alterations to TadA*7.10 selected from:
i) I76Y, V82T, Y123H, Y147R, F149Y, and Q154R; and
ii) I76Y, V82T, Y123H, Y147D, F149Y, Q154R, T166I, and D167N; wherein the adenosine deaminase domain has at least 85% sequence identity to TadA*7.10.

4. A method for treating a hemoglobinopathy in a subject, the method comprising:
(a) contacting an isolated hematopoietic stem cell or progenitor thereof with two or more guide polynucleotides and a base editor comprising a nucleic acid programmable DNA binding protein (napDNAbp) and an adenosine deaminase domain or a polynucleotide encoding the base editor, wherein one guide polynucleotide targets a nucleic acid molecule encoding a CD117 polypeptide and another guide polynucleotide targets the base editor to effect a deamination of a nucleobase of a hemoglobin subunit gamma 1 and/or 2 (HBG1/2) promoter, thereby generating an edited cell;
(b) administering the edited cell to the subject; and
(c) administering to the subject an antibody or antigen binding fragment thereof, wherein the antibody is selected from the group consisting of ABTx025, ABTx030, ABTx052, ABTx061, ABTx062, ABTx070, ABTx071, ABTx196, ABTx198, ABTx202, ABTx203, ABTx205, ABTx206, ABTx248, ABTx250, ABTx251, ABTx253, ABTx254, ABTx255, ABTx256, ABTx265, ABTx268, ABTx270, ABTx271, ABTx272, ABTx273, ABTx274, ABTx307, ABTx308, ABTx309, and ABTx313.

5. The method of claim 4, wherein in step (a),
1. one guide polynucleotide targets a nucleic acid molecule encoding a CD117 polypeptide, thereby
i) introducing an alteration of a nucleobase in a codon encoding a serine at amino acid position 261, wherein the alteration of the nucleobase encoding the serine at amino acid position 261 results in the codon expressing a glycine,
ii) introducing an alteration of a nucleobase in a codon encoding a serine at amino acid position 251, and/or
iii) introducing an alteration of a nucleobase in a codon encoding an asparagine at amino acid position 260 and introducing an alteration of a nucleobase in a codon encoding a serine at amino acid position 261 or corresponding positions in another CD117 polypeptide; and
2) another guide polynucleotide targets the base editor to effect an alteration to a beta globin polynucleotide (HBB) that results in expression of a beta globin polypeptide having an alanine at position 6 (Hb G-Makassar), thereby generating an edited cell;
(b) administering the edited cell to the subject; and
(c) administering to the subject an antibody or antigen binding fragment thereof, antibody drug conjugate, or a chimeric antigen receptor T (CAR-T) cell, each of which selectively binds a wild type CD117 polypeptide.

6. A method of altering a nucleobase of a CD117 polynucleotide, the method comprising:
contacting the CD117 polynucleotide with a base editor polypeptide comprising a nucleic acid programmable DNA binding protein (napDNAbp) and an adenosine deaminase domain, and a guide polynucleotide that targets said base editor to
i) effect an alteration of a nucleobase in a codon encoding a serine at amino acid position 261, wherein the alteration of the nucleobase encoding the serine at amino acid position 261 results in the codon expressing a glycine,
ii) effect an alteration of a nucleobase in a codon encoding a serine at amino acid position 251, and/or
iii) effect an alteration of a nucleobase in a codon encoding an asparagine at amino acid position 260 and effect an alteration of a nucleobase in a codon encoding a serine at amino acid position 261, or corresponding positions in another CD117 polypeptide, thereby altering the nucleobase of the CD117 polynucleotide.

7. The method of claim 6, wherein the adenosine deaminase domain comprises a combination of alterations to TadA*7.10 selected from:
a) I76Y, V82T, Y123H, Y147R, F149Y, and Q154R; and
b) I76Y, V82T, Y123H, Y147D, F149Y, Q154R, T166I, and D167N; wherein the adenosine deaminase domain has at least 85% sequence identity to TadA*7.10, and a guide polynucleotide that targets the base editor to effect an alteration of a nucleobase in a polynucleotide encoding a CD117 polypeptide, thereby altering the nucleobase of the CD117 polynucleotide.

8. A cell produced by the method of claim 1.

9. A pharmaceutical composition comprising an effective amount of the cell of claim 8.

10. A base editor system comprising a base editor comprising a nucleic acid programmable DNA binding protein (napDNAbp) and an adenosine deaminase domain or a polynucleotide encoding the base editor, and a guide polynucleotide that targets said base editor to
i) effect an alteration of a nucleobase in a codon encoding a serine at amino acid position 261, wherein the alteration of the nucleobase encoding the serine at amino acid position 261 results in the codon expressing a glycine,
ii) effect an alteration of a nucleobase in a codon encoding a serine at amino acid position 251, and/or
iii) effect an alteration of a nucleobase in a codon encoding an asparagine at amino acid position 260 and effect an alteration of a nucleobase in a codon encoding a serine at amino acid position 261, or corresponding positions in another CD117 polypeptide, thereby altering the nucleobase of the CD117 polynucleotide.

11. The base editor system of claim 10, wherein the adenosine deaminase domain comprises a combination of alterations to TadA*7.10, wherein the combinations are selected from:
a) I76Y, V82T, Y123H, Y147R, F149Y, and Q154R; and
b) I76Y, V82T, Y123H, Y147D, F149Y, Q154R, T166I, and D167N; wherein the guide polynucleotide targets the base editor to effect an alteration of a nucleobase of a CD117 polynucleotide, wherein the adenosine deaminase domain has at least 85% sequence identity to TadA*7.10.

12. The base editor system of claim 10, wherein the guide polynucleotide comprises a polynucleotide sequence selected from the group consisting of: AUAAUAGCUGGCAUCACGGU (SEQ ID NO: 693; CC200);
(SEQ ID NO: 694; gRNA889)
CCACUAGCUUUCCAAACGGU;
(SEQ ID NO: 695; gRNA908)
GCUGAACUGAUAGUCAACGU;
(SEQ ID NO: 696; gRNA918)
UUUGACAAAGCCCGGAUCAG;
(SEQ ID NO: 697; gRNA923)
UGAAAGUGAGGCCAGGUACU;
(SEQ ID NO: 698; gRNA928)
AAACAGUCAGGUGAGUGAAU;
(SEQ ID NO: 699; gRNA929)
AACUACAGGAGAAAUAUAAU;
and
(SEQ ID NO: 700; gRNA944)
GAUUAAAAGGCACCGAAGGA.

13. A polynucleotide encoding the base editor system of claim 10.

14. A guide polynucleotide comprising a spacer sequence selected from the group consisting of:
(SEQ ID NO: 693; gRNA931)
AUAAUAGCUGGCAUCACGGU;
(SEQ ID NO: 694; gRNA889)
CCACUAGCUUUCCAAACGGU;
(SEQ ID NO: 695; gRNA908)
GCUGAACUGAUAGUCAACGU;
(SEQ ID NO: 696; gRNA918)
UUUGACAAAGCCCGGAUCAG;
(SEQ ID NO: 697; gRNA923)
UGAAAGUGAGGCCAGGUACU;
(SEQ ID NO: 698; gRNA928)
AAACAGUCAGGUGAGUGAAU;
(SEQ ID NO: 699; gRNA929)
AACUACAGGAGAAAUAUAAU;
and
(SEQ ID NO: 700; gRNA944)
GAUUAAAAGGCACCGAAGGA.

15. A kit comprising base editor system of claim 10.

16. An anti-CD117 antibody or antigen-binding portion thereof comprising one or more complementarity determining regions (CDRs) which comprise or consist of heavy chain variable region (VH) CDRs and/or light chain variable region (VL) CDRs selected from the following:
A)
VL CDR1:
(SEQ ID NO: 394)
QSVSSSY;
VL CDR2:
GAS;
VL CDR3:
(SEQ ID NO: 395)
QQYGTSLT;
VH CDR1:
(SEQ ID NO: 391)
GFTFDDYA;
VH CDR2:
(SEQ ID NO: 392)
ISWNSGTI;
VH CDR3:
(SEQ ID NO: 393)
AKDSPPGYCSSASCYGAFDI (ABTx025);
B)
VL CDR1:
(SEQ ID NO: 409)
QSISSY;
VL CDR2:
AAS;
VL CDR3:
(SEQ ID NO: 410)
QQSYSTPLT;
VH CDR1:
(SEQ ID NO: 406)
GFTFSSYS;
VH CDR2:
(SEQ ID NO: 407)
IGTISSYI;
VH CDR3:
(SEQ ID NO: 408)
ARDYYGGLFDY (ABTx030);
C)
VL CDR1:
(SEQ ID NO: 439)
QSVSSSY;
VL CDR2:
GAS;
VL CDR3:
(SEQ ID NO: 440)
QQYGSSPLT;
VH CDR1:
(SEQ ID NO: 436)
GFTFDDYA;
VH CDR2:
(SEQ ID NO: 437)
ISWNSGSI;
VH CDR3:
(SEQ ID NO: 438)
AKDTPLGYCSTTSCYGAFDI (ABTx061);
D)
VL CDR1:
(SEQ ID NO: 454)
QSISSY;
VL CDR2:
AAS;
VL CDR3:
(SEQ ID NO: 455)
QQSYSTPFT;
VH CDR1:
(SEQ ID NO: 451)
GFTFDDYA;
VH CDR2:
(SEQ ID NO: 452)
ISWNSGTI;
VH CDR3:
(SEQ ID NO: 453)
AKDSPPGYCSSASCYGAFDI (ABTx062);
E)
VL CDR1:
(SEQ ID NO: 469)
QGISSY;
VL CDR2:
AAS;
VL CDR3:
(SEQ ID NO: 470)
QQSYSTPIT;
VH CDR1:
(SEQ ID NO: 466)
GFTFDDYG;
VH CDR2:
(SEQ ID NO: 467)
INWNGGST;
VH CDR3:
(SEQ ID NO: 468)
ARESWDGSGIYYMDV (ABTx070);
F)
VL CDR1:
(SEQ ID NO: 484)
QGISSY;
VL CDR2:
AAS;
VL CDR3:
(SEQ ID NO: 485)
QQLNSYPYT;
VH CDR1:
(SEQ ID NO:481)
GFTFDDYG;
VH CDR2:
(SEQ ID NO: 482)
INWNGGST;
VH CDR3:
(SEQ ID NO: 483)
ARESWNYEGYYYMDV (ABTx071);
G)
VL CDR1:
(SEQ ID NO: 424)
QGISSA;
VL CDR2:
DAS;
VL CDR3:
(SEQ ID NO: 425)
QQFNSYPLT;
VH CDR1:
(SEQ ID NO: 421)
GYRFTSYW;
VH CDR2:
(SEQ ID NO: 958)
IYPGDSDTR;
VH CDR3:
(SEQ ID NO: 1012)
ARHGRGYDGYDGAFDI;
H)
VL CDR1:
(SEQ ID NO: 424)
QGISSA;
VL CDR2:
DAS;
VL CDR3:
(SEQ ID NO: 425)
QQFNSYPLT;
VH CDR1:
(SEQ ID NO: 421)
GYRFTSYW;
VH CDR2:
(SEQ ID NO: 972)
IYPGDSDTK;
VH CDR3:
(SEQ ID NO: 948)
ARHGRGYDGYEGAFDI;
I)
VL CDR1:
(SEQ ID NO: 424)
QGISSA;
VL CDR2:
DAS;
VL CDR3:
(SEQ ID NO: 954)
QQFYSYPLT;
VH CDR1:
(SEQ ID NO: 421)
GYRFTSYW;
VH CDR2:
(SEQ ID NO: 958)
TYPGDSDTR;
VH CDR3:
(SEQ ID NO: 948)
ARHGRGYDGYEGAFDI;
J)
VL CDR1:
(SEQ ID NO: 424)
QGISSA;
VL CDR2:
DAS;
VL CDR3:
(SEQ ID NO: 1020)
QQFSSYPLT;
VH CDR1:
(SEQ ID NO: 421)
GYRFTSYW;
VH CDR2:
(SEQ ID NO: 958)
IYPGDSDTR;
VH CDR3:
(SEQ ID NO: 948)
ARHGRGYDGYEGAFDI;
K)
VL CDR1:
(SEQ ID NO: 424)
QGISSA;
VL CDR2:
DAS;
VL CDR3:
(SEQ ID NO: 1023)
QQTNSHPLT;
VH CDR1:
(SEQ ID NO: 421)
GYRFTSYW;
VH CDR2:
(SEQ ID NO: 972)
IYPGDSDTK;
VH CDR3:
(SEQ ID NO: 1012)
ARHGRGYDGYDGAFDI;
L)
VL CDR1:
(SEQ ID NO: 424)
QGISSA;
VL CDR2:
DAS;
VL CDR3:
(SEQ ID NO: 1025)
QQVRSYPLT;
VH CDR1:
(SEQ ID NO: 421)
GYRFTSYW;
VH CDR2:
(SEQ ID NO: 972)
IYPGDSDTK;
VH CDR3:
(SEQ ID NO: 948)
ARHGRGYDGYEGAFDI;
M)
VL CDR1:
(SEQ ID NO: 424)
QGISSA;
VL CDR2:
DAS;
VL CDR3:
(SEQ ID NO: 1029)
QQTYSYPLT;
VH CDR1:
(SEQ ID NO: 421)
GYRFTSYW;
VH CDR2:
(SEQ ID NO: 958)
IYPGDSDTR;
VH CDR3:
(SEQ ID NO: 1027)
ARHGRGYDAYEGAFDI;
N)
VL CDR1:
(SEQ ID NO: 424)
QGISSA;
VL CDR2:
DAS;
VL CDR3:
(SEQ ID NO: 1036)
QQTRSYPLT;
VH CDR1:
(SEQ ID NO: 421)
GYRFTSYW;
VH CDR2:
(SEQ ID NO: 972)
IYPGDSDTK;
VH CDR3:
(SEQ ID NO: 1012)
ARHGRGYDGYDGAFDI;
O)
VL CDR1:
(SEQ ID NO: 424)
QGISSA;
VL CDR2:
DAS;
VL CDR3:
(SEQ ID NO: 952)
QQVNSYPLT;
VH CDR1:
(SEQ ID NO: 421)
GYRFTSYW;
VH CDR2:
(SEQ ID NO: 972)
IYPGDSDTK;
VH CDR3:
(SEQ ID NO: 948)
ARHGRGYDGYEGAFDI;
P)
VL CDR1:
(SEQ ID NO: 424)
QGISSA;
VL CDR2:
DAS;
VL CDR3:
(SEQ ID NO: 1025)
QQVRSYPLT;
VH CDR1:
(SEQ ID NO: 421)
GYRFTSYW;
VH CDR2:
(SEQ ID NO: 958)
IYPGDSDTR;
VH CDR3:
(SEQ ID NO: 1027)
ARHGRGYDAYEGAFDI;
Q)
VL CDR1:
(SEQ ID NO: 424)
QGISSA;
VL CDR2:
DAS;
VL CDR3:
(SEQ ID NO: 1044)
QQTNSYPLT;
VH CDR1:
(SEQ ID NO: 421)
GYRFTSYW;
VH CDR2:
(SEQ ID NO: 958)
IYPGDSDTR;
VH CDR3:
(SEQ ID NO: 1032)
ARHGRGYDAYDGAFDI;
R)
VL CDR1:
(SEQ ID NO: 424)
QGISSA;
VL CDR2:
DAS;
VL CDR3:
(SEQ ID NO: 1025)
QQVRSYPLT;
VH CDR1:
(SEQ ID NO: 421)
GYRFTSYW;
VH CDR2:
(SEQ ID NO: 972)
IYPGDSDTK;
VH CDR3:
(SEQ ID NO: 1012)
ARHGRGYDGYDGAFDI;
S)
VL CDR1:
(SEQ ID NO: 424)
QGISSA;
VL CDR2:
DAS;
VL CDR3:
(SEQ ID NO: 953)
QQFRSYPLT;
VH CDR1:
(SEQ ID NO: 421)
GYRFTSYW;
VH CDR2:
(SEQ ID NO: 958)
IYPGDSDTR;
VH CDR3:
(SEQ ID NO: 948)
ARHGRGYDGYEGAFDI;
T)
VL CDR1:
(SEQ ID NO: 424)
QGISSA;
VL CDR2:
DAS;
VL CDR3:
(SEQ ID NO: 1044)
QQTNSYPLT;
VH CDR1:
(SEQ ID NO: 421)
GYRFTSYW;
VH CDR2:
(SEQ ID NO: 972)
TYPGDSDTK;
VH CDR3:
(SEQ ID NO: 948)
ARHGRGYDGYEGAFDI;
U)
VL CDR1:
(SEQ ID NO: 394)
QSVSSSY;
VL CDR2:
GAS;
VL CDR3:
(SEQ ID NO: 1074)
QQSETCLT;
VH CDR1:
(SEQ ID NO: 391)
GFTFDDYA
VH CDR2:
(SEQ ID NO: 1070)
ISWNSGTIG;
VH CDR3:
(SEQ ID NO: 393)
AKDSPPGYCSSASCYGAFDI;
V)
VL CDR1:
(SEQ ID NO: 394)
QSVSSSY;
VL CDR2:
GAS;
VL CDR3:
(SEQ ID NO: 1074)
QQDSLGLT;
VH CDR1:
(SEQ ID NO: 391)
GFTFDDYA;
VH CDR2:
(SEQ ID NO: 1070)
ISWNSGTIG;
VH CDR3:
(SEQ ID NO: 1090)
AKDSPPGYCASASCYGAFDI;
W)
VL CDR1:
(SEQ ID NO: 394)
QSVSSSY;
VL CDR2:
GSS;
VL CDR3:
(SEQ ID NO: 1084)
QQYNFWPYT;
VH CDR1:
(SEQ ID NO: 391)
GFTFDDYA;
VH CDR2:
(SEQ ID NO: 1070)
ISWNSGTIG;
VH CDR3:
(SEQ ID NO: 393)
AKDSPPGYCSSASCYGAFDI;
X)
VL CDR1:
(SEQ ID NO: 469)
QGISSY;
VL CDR2:
AAS;
VL CDR3:
(SEQ ID NO: 1097)
QQSYSTPYT;
VH CDR1:
(SEQ ID NO: 391)
GFTFDDYA;
VH CDR2:
(SEQ ID NO: 1070)
ISWNSGTIG;
VH CDR3:
(SEQ ID NO: 1094)
AKDWPSGFCSSAYCYGAFDI;
Y)
VL CDR1:
(SEQ ID NO: 469)
QGISSY;
VL CDR2:
AAS;
VL CDR3:
(SEQ ID NO: 1097)
QQSYSTPYT;
VH CDR1:
(SEQ ID NO: 1071)
GFTFDDYA;
VH CDR2:
(SEQ ID NO: 1070)
ISWNSGTIG;
VH CDR3:
(SEQ ID NO: 393)
AKDSPPGYCSSASCYGAFDI;
Z)
VL CDR1:
(SEQ ID NO: 424)
QGISSA;
VL CDR2:
DAS;
VL CDR3:
(SEQ ID NO: 425)
QQFNSYPLT;
VH CDR1:
(SEQ ID NO: 421)
GYRFTSYW;
VH CDR2:
(SEQ ID NO: 958)
IYPGDSDTR;
VH CDR3:
(SEQ ID NO: 1012)
ARHGRGYDGYDGAFDI;
AA)
VL CDR1:
(SEQ ID NO: 424)
QGISSA;
VL CDR2:
DAS;
VL CDR3:
(SEQ ID NO: 1020)
QQFSSYPLT;
VH CDR1:
(SEQ ID NO: 421)
GYRFTSYW;
VH CDR2:
(SEQ ID NO: 972)
TYPGDSDTK;
VH CDR3:
(SEQ ID NO: 1032)
ARHGRGYDAYDGAFDI;
AB)
VL CDR1:
(SEQ ID NO: 424)
QGISSA;
VL CDR2:
DAS;
VL CDR3:
(SEQ ID NO: 1044)
QQTNSYPLT;
VH CDR1:
(SEQ ID NO: 421)
GYRFTSYW;
VH CDR2:
(SEQ ID NO: 958)
IYPGDSDTR;
VH CDR3:
(SEQ ID NO: 1032)
ARHGRGYDAYDGAFDI;
and
AC)
VL CDR1:
(SEQ ID NO: 424)
QGISSA;
VL CDR2:
DAS;
VL CDR3:
(SEQ ID NO: 425)
QQFSSYPLT;
VH CDR1:
(SEQ ID NO: 421)
GYRFTSYW;
VH CDR2:
(SEQ ID NO: 958)
IYPGDSDTR;
VH CDR3:
(SEQ ID NO: 1012)
ARHGRGYDGYDGAFDI.

17. An isolated polynucleotide that encodes the antibody of claim 16.

18. An anti-CD117 antibody or antigen-binding portion thereof comprising complementarity determining regions (CDRs) that comprise or consist of the following heavy chain variable region (VH) CDR and light chain variable region (VL) CDR amino acid sequences:
VH CDR1: GX₁X₂FX₃X₄YX₅, wherein
X₁ is F or Y,
X₂ is R or T,
X₃ is D, S, or T,
X₄ is D or S, and
X₅ is A, G, S, or W;
VH CDR2 is IX₆X₇X₈X₉X₁₀X₁₁X₁₂X₁₃, wherein
X₆ is G, N, S, or Y,
X₇ is P, T, or W,
X₈ is G, I, or N,
X₉ is D, G, or S,
X₁₀ is Gor S,
X₁₁ is D, S, T, or Y,
X₁₂ is I or T, and
X₁₃ is G, K, R, or Y;
VH CDR3 is selected from the group consisting of ARHGRGYDX₁₄ YDGAFDI (SEQ ID NO: 1105), ARDYYGGLFDY (SEQ ID NO: 1106), ARESWX₁₅X₁₆X₁₇GX₁₈ YYMDV (SEQ ID NO: 1107), and AKDX₁₉PX₂₀GX₂₁CX₂₂X₂₃X₂₄X₂₅CYGAFDI (SEQ ID NO: 1108), wherein
X₁₄ is A or G,
X₁₅ is D or N,
X₁₆ is Gor Y,
X₁₇ is E or S,
X₁₈ is I or Y,
X₁₉ is S, T, or W,
X₂₀ is L, P, or S,
X₂₁ is F or Y,
X₂₂ is A or S,
X₂₃ is S or T,
X₂₄ is A or T, and
X₂₅ is S or Y;
VL CDR1 is QSX₂₆SSX₂₇ (SEQ ID NO: 1109) or QSVSSSY (SEQ ID NO: 1110), wherein
X₂₆ is Gor S, and
X₂₇ is A or Y;
VL CDR2: X₂₈X₂₉S, wherein,
X₂₈ is A, D, or G, and
X₂₉ is A or S; and
VL CDR3 is QQX₃₀X₃₁X₃₂X₃₃PX₃₄T (SEQ ID NO: 1111) or QQX₃₅X₃₆X₃₇X₃₈LT (SEQ ID NO: 1112), wherein
X₃₀ is F, L, S, T, or Y,
X₃₁ G, N, S, or Y,
X₃₂ is S or F,
X₃₃ S, T, W, or Y,
X₃₄ F, I, L, or Y,
X₃₅ is D, S, or Y,
X₃₆ is E, G, or S,
X₃₇ is L or T, and
X₃₈ is C, G, or S;
and wherein the anti-CD117 antibody comprises at least one amino acid alteration relative to the amino acid sequence of ABTx052.

19. A method for hematopoietic stem cell transplantation in a subject, the method comprising:
(a) administering a hematopoietic stem cell or progenitor thereof to the subject, wherein the hematopoietic stem cell or progenitor thereof expresses a CD117 variant comprising an S261G amino acid alteration, or a CD117 variant comprising Y259C and N260D amino acid alterations; and
(b) administering to the subject an antibody or antigen binding fragment thereof that selectively binds a wild type CD117 polypeptide.

20. The method of claim 19, wherein the hematopoietic stem cell or progenitor thereof:
i) either expresses a CD117 variant comprising an S261G amino acid alteration or a CD117 variant comprising Y259C and N260D amino acid alterations, and
ii) comprises a nucleobase alteration to the HBG1/2 promoter that effects an increase in gamma globin expression and/or expresses an HBB polypeptide comprising an alanine at position 6.

21. A hematopoietic stem cell or progenitor thereof expressing a CD117 polypeptide comprising
i) an S261G alteration,
ii) alterations at amino acid positions 260 and 261, and/or
ii) an alteration at amino acid position 251, relative to the following amino acid sequence,
wherein the CD117 polypeptide has at least 85% sequence identity to the following amino acid sequence:
Wild Type CD117
(SEQ ID NO: 499)
[sequence omitted]

22. The hematopoietic stem cell or progenitor thereof expressing a CD117 polypeptide, the CD117 polypeptide comprising a sequence comprising 10, 20, 30, or 40 consecutive amino acids, wherein the sequence of consecutive amino acids comprises amino acid position 260, amino acid positions 261, and/or amino acid position 251 relative to the following amino acid sequence, wherein:
i) an amino acid corresponding to amino acid position 261 is substituted with a glycine,
ii) the amino acids corresponding to amino acid positions 260 and 261 are altered, and/or
iii) an amino acid corresponding to amino acid position 251 is altered relative to the following amino acid sequence in the sequence of consecutive amino acids, wherein the sequence of consecutive amino acids has at least 85% sequence identity to a fragment of the following amino acid sequence that has the same length as the sequence of consecutive amino acids, and wherein the CD117 polypeptide is capable of binding a stem cell factor (SCF) polypeptide:
Wild Type CD117
(SEQ ID NO: 499)
[sequence omitted]

The application's sequence listing, which the Patent Office published only in electronic form, follows.

SEQUENCE LISTING (1138 sequences)

SEQ ID NO: 1 - protein, 167 aa, Escherichia coli
  REGION 1..167: note = misc_feature - TadA*7.10 (ecTadA) polypeptide sequence
MSEVEFSHEYWMRHALTLAKRARDEREVPVGAVLVLNNRVIGEGWNRAIGLHDPTAHAEIMALRQGGLVMQNYRLIDATLYVTFEPCVMCAGAMIHSRIGRVVFGVRNAKTGAAGSLMDVLHYPGMNHRVEITEGILADECAALLCYFFRMPRQVFNAQKKAQSSTD

SEQ ID NO: 2 - DNA, 4092 bp, synthetic construct
  misc_feature 1..4092: note = BhCas12b GGSGGS-ABE8-Xten20at P153 polynucleotide sequence
  misc_feature 1..6: note = Kozak sequence
  misc_feature 7..57: note = Sequence encoding N-terminal nuclear localization signal
  misc_feature 58..513: note = Sequence encoding BhCas12b
  misc_feature 514..531: note = Sequence encoding a linker
  misc_feature 532..1029: note = Sequence encoding TadA*8
  misc_feature 1030..1089: note = Sequence encoding Xten20 linker
  misc_feature 1090..3954: note = Sequence encoding BhCas12b
  misc_feature 3955..4002: note = Sequence encoding C-terminal NLS
  misc_feature 4003..4008: note = Sequence encoding GS linker
  misc_feature 4009..4089: note = Sequence encoding 3x hemagglutinin (HA) tag
  source 1..4092: mol_type = other DNA
gccaccatggccccaaagaagaagcggaaggtcggtatccacggagtcccagcagccgccaccagatccttcatcctgaagatcgagcccaacgaggaagtgaagaaaggcctctggaaaacccacgaggtgctgaaccacggaatcgcctactacatgaatatcctgaagctgatccggcaagaggccatctacgagcaccacgagcaggaccccaagaatcccaagaaggtgtccaaggccgagatccaggccgagctgtgggatttcgtgctgaagatgcagaagtgcaacagcttcacacacgaggtggacaaggacgaggtgttcaacatcctgagagagctgtacgaggaactggtgcccagcagcgtggaaaagaagggcgaagccaaccagctgagcaacaagtttctgtaccctctggtggaccccaacagccagtctggaaagggaacagccagcagcggcagaaagcccagatggtacaacctgaagattgccggcgatcccggaggctctggaggaagctccgaagtcgagttttcccatgagtactggatgagacacgcattgactctcgcaaagagggctcgagatgaacgcgaggtgcccgtgggggcagtactcgtgctcaacaatcgcgtaatcggcgaaggttggaatagggcaatcggactccacgaccccactgcacatgcggaaatcatggcccttcgacagggagggcttgtgatgcagaattatcgactttatgatgcgacgctgtacgtcacgtttgaaccttgcgtaatgtgcgcgggagctatgattcactcccgcattggacgagttgtattcggtgttcgcaacgccaagacgggtgccgcaggttcactgatggacgtgctgcatcatccaggcatgaaccaccgggtagaaatcacagaaggcatattggcggacgaatgtgcggcgctgttgtgtcgtttttttcgcatgcccaggcgggtctttaacgcccagaaaaaagcacaatcctctactgacggctcttctggatctgaaacacctggcacaagcgagagcgccacccctgagagctctggctcctgggaagaagagaagaagaagtgggaagaagataagaaaaaggacccgctggccaagatcctgggcaagctggctgagtacggactgatccctctgttcatcccctacaccgacagcaacgagcccatcgtgaaagaaatcaagtggatggaaaagtcccggaaccagagcgtgcggcggctggataaggacatgttcattcaggccctggaacggttcctgagctgggagagctggaacctgaaagtgaaagaggaatacgagaaggtcgagaaagagtacaagaccctggaagagaggatcaaagaggacatccaggctctgaaggctctggaacagtatgagaaagagcggcaagaacagctgctgcgggacaccctgaacaccaacgagtaccggctgagcaagagaggccttagaggctggcgggaaatcatccagaaatggctgaaaatggacgagaacgagccctccgagaagtacctggaagtgttcaaggactaccagcggaagcaccctagagaggccggcgattacagcgtgtacgagttcctgtccaagaaagagaaccacttcatctggcggaatcaccctgagtacccctacctgtacgccaccttctgcgagatcgacaagaaaaagaaggacgccaagcagcaggccaccttcacactggccgatcctatcaatcaccctctgtgggtccgattcgaggaaagaagcggcagcaacctgaacaagtacagaatcctgaccgagcagctgcacaccgagaagctgaagaaaaagctgacagtgcagctggaccggctgatctaccctacagaatctggcggctgggaagagaagggcaaagtggacattgtgctgctgcccagccggcagttctacaaccagatcttcctggacatcgaggaaaagggcaagcacgccttcacctacaaggatgagagcatcaagttccctctgaagggcacactcggcggagccagagtgcagttcgacagagatcacctgagaagataccctcacaaggtggaaagcggcaacgtgggcagaatctacttcaacatgaccgtgaacatcgagcctacagagtccccagtgtccaagtctctgaagatccaccgggacgacttccccaaggtggtcaacttcaagcccaaagaactgaccgagtggatcaaggacagcaagggcaagaaactgaagtccggcatcgagtccctggaaatcggcctgagagtgatgagcatcgacctgggacagagacaggccgctgccgcctctattttcgaggtggtggatcagaagcccgacatcgaaggcaagctgtttttcccaatcaagggcaccgagctgtatgccgtgcacagagccagcttcaacatcaagctgcccggcgagacactggtcaagagcagagaagtgctgcggaaggccagagaggacaatctgaaactgatgaaccagaagctcaacttcctgcggaacgtgctgcacttccagcagttcgaggacatcaccgagagagagaagcgggtcaccaagtggatcagcagacaagagaacagcgacgtgcccctggtgtaccaggatgagctgatccagatccgcgagctgatgtacaagccttacaaggactgggtcgccttcctgaagcagctccacaagagactggaagtcgagatcggcaaagaagtgaagcactggcggaagtccctgagcgacggaagaaagggcctgtacggcatctccctgaagaacatcgacgagatcgatcggacccggaagttcctgctgagatggtccctgaggcctaccgaacctggcgaagtgcgtagactggaacccggccagagattcgccatcgaccagctgaatcacctgaacgccctgaaagaagatcggctgaagaagatggccaacaccatcatcatgcacgccctgggctactgctacgacgtgcggaagaagaaatggcaggctaagaaccccgcctgccagatcatcctgttcgaggatctgagcaactacaacccctacgaggaaaggtcccgcttcgagaacagcaagctcatgaagtggtccagacgcgagatccccagacaggttgcactgcagggcgagatctatggcctgcaagtgggagaagtgggcgctcagttcagcagcagattccacgccaagacaggcagccctggcatcagatgtagcgtcgtgaccaaagagaagctgcaggacaatcggttcttcaagaatctgcagagagagggcagactgaccctggacaaaatcgccgtgctgaaagagggcgatctgtacccagacaaaggcggcgagaagttcatcagcctgagcaaggatcggaagtgcgtgaccacacacgccgacatcaacgccgctcagaacctgcagaagcggttctggacaagaacccacggcttctacaaggtgtactgcaaggcctaccaggtggacggccagaccgtgtacatccctgagagcaaggaccagaagcagaagatcatcgaagagttcggcgagggctacttcattctgaaggacggggtgtacgaatgggtcaacgccggcaagctgaaaatcaagaagggcagctccaagcagagcagcagcgagctggtggatagcgacatcctgaaagacagcttcgacctggcctccgagctgaaaggcgaaaagctgatgctgtacagggaccccagcggcaatgtgttccccagcgacaaatggatggccgctggcgtgttcttcggaaagctggaacgcatcctgatcagcaagctgaccaaccagtactccatcagcaccatcgaggacgacagcagcaagcagtctatgaaaaggccggcggccacgaaaaaggccggccaggcaaaaaagaaaaagggatcctacccatacgatgttccagattacgcttatccctacgacgtgcctgattatgcatacccatatgatgtccccgactatgcctaa

SEQ ID NO: 3 - protein, 1361 aa, synthetic construct
  REGION 1..1361: note = BhCas12b GGSGGS-ABE8-Xten20at P153 polypeptide sequence
MAPKKKRKVGIHGVPAAATRSFILKIEPNEEVKKGLWKTHEVLNHGIAYYMNILKLIRQEAIYEHHEQDPKNPKKVSKAEIQAELWDFVLKMQKCNSFTHEVDKDEVFNILRELYEELVPSSVEKKGEANQLSNKFLYPLVDPNSQSGKGTASSGRKPRWYNLKIAGDPGGSGGSSEVEFSHEYWMRHALTLAKRARDEREVPVGAVLVLNNRVIGEGWNRAIGLHDPTAHAEIMALRQGGLVMQNYRLYDATLYVTFEPCVMCAGAMIHSRIGRVVFGVRNAKTGAAGSLMDVLHHPGMNHRVEITEGILADECAALLCRFFRMPRRVFNAQKKAQSSTDGSSGSETPGTSESATPESSGSWEEEKKKWEEDKKKDPLAKILGKLAEYGLIPLFIPYTDSNEPIVKEIKWMEKSRNQSVRRLDKDMFIQALERFLSWESWNLKVKEEYEKVEKEYKTLEERIKEDIQALKALEQYEKERQEQLLRDTLNTNEYRLSKRGLRGWREIIQKWLKMDENEPSEKYLEVFKDYQRKHPREAGDYSVYEFLSKKENHFIWRNHPEYPYLYATFCEIDKKKKDAKQQATFTLADPINHPLWVRFEERSGSNLNKYRILTEQLHTEKLKKKLTVQLDRLIYPTESGGWEEKGKVDIVLLPSRQFYNQIFLDIEEKGKHAFTYKDESIKFPLKGTLGGARVQFDRDHLRRYPHKVESGNVGRIYFNMTVNIEPTESPVSKSLKIHRDDFPKVVNFKPKELTEWIKDSKGKKLKSGIESLEIGLRVMSIDLGQRQAAAASIFEVVDQKPDIEGKLFFPIKGTELYAVHRASFNIKLPGETLVKSREVLRKAREDNLKLMNQKLNFLRNVLHFQQFEDITEREKRVTKWISRQENSDVPLVYQDELIQIRELMYKPYKDWVAFLKQLHKRLEVEIGKEVKHWRKSLSDGRKGLYGISLKNIDEIDRTRKFLLRWSLRPTEPGEVRRLEPGQRFAIDQLNHLNALKEDRLKKMANTIIMHALGYCYDVRKKKWQAKNPACQIILFEDLSNYNPYEERSRFENSKLMKWSRREIPRQVALQGEIYGLQVGEVGAQFSSRFHAKTGSPGIRCSVVTKEKLQDNRFFKNLQREGRLTLDKIAVLKEGDLYPDKGGEKFISLSKDRKCVTTHADINAAQNLQKRFWTRTHGFYKVYCKAYQVDGQTVYIPESKDQKQKIIEEFGEGYFILKDGVYEWVNAGKLKIKKGSSKQSSSELVDSDILKDSFDLASELKGEKLMLYRDPSGNVFPSDKWMAAGVFFGKLERILISKLTNQYSISTIEDDSSKQSMKRPAATKKAGQAKKKKGSYPYDVPDYAYPYDVPDYAYPYDVPDYA

SEQ ID NO: 4 - DNA, 4092 bp, synthetic construct
  misc_feature 1..4092: note = BhCas12b GGSGGS-ABE8-Xten20at K255 polynucleotide sequence
  misc_feature 1..6: note = Kozak sequence
  misc_feature 7..57: note = Sequence encoding N-terminal nuclear localization signal (NLS)
  misc_feature 58..822: note = Sequence encoding BhCas12b
  misc_feature 823..840: note = Sequence encoding a linker
  misc_feature 841..1338: note = Sequence encoding TadA*8
  misc_feature 1339..1398: note = Sequence encoding Xten20 linker
  misc_feature 1399..3954: note = Sequence encoding BhCas12b
  misc_feature 3955..4002: note = Sequence encoding C-terminal NLS
  misc_feature 4003..4008: note = Sequence encoding a GS linker
  misc_feature 4009..4089: note = Sequence encoding 3x hemagglutinin (HA) tag
  source 1..4092: mol_type = other DNA
gccaccatggccccaaagaagaagcggaaggtcggtatccacggagtcccagcagccgccaccagatccttcatcctgaagatcgagcccaacgaggaagtgaagaaaggcctctggaaaacccacgaggtgctgaaccacggaatcgcctactacatgaatatcctgaagctgatccggcaagaggccatctacgagcaccacgagcaggaccccaagaatcccaagaaggtgtccaaggccgagatccaggccgagctgtgggatttcgtgctgaagatgcagaagtgcaacagcttcacacacgaggtggacaaggacgaggtgttcaacatcctgagagagctgtacgaggaactggtgcccagcagcgtggaaaagaagggcgaagccaaccagctgagcaacaagtttctgtaccctctggtggaccccaacagccagtctggaaagggaacagccagcagcggcagaaagcccagatggtacaacctgaagattgccggcgatccctcctgggaagaagagaagaagaagtgggaagaagataagaaaaaggacccgctggccaagatcctgggcaagctggctgagtacggactgatccctctgttcatcccctacaccgacagcaacgagcccatcgtgaaagaaatcaagtggatggaaaagtcccggaaccagagcgtgcggcggctggataaggacatgttcattcaggccctggaacggttcctgagctgggagagctggaacctgaaagtgaaagaggaatacgagaaggtcgagaaagagtacaagaccctggaagagaggatcaaaggaggctctggaggaagctccgaagtcgagttttcccatgagtactggatgagacacgcattgactctcgcaaagagggctcgagatgaacgcgaggtgcccgtgggggcagtactcgtgctcaacaatcgcgtaatcggcgaaggttggaatagggcaatcggactccacgaccccactgcacatgcggaaatcatggcccttcgacagggagggcttgtgatgcagaattatcgactttatgatgcgacgctgtacgtcacgtttgaaccttgcgtaatgtgcgcgggagctatgattcactcccgcattggacgagttgtattcggtgttcgcaacgccaagacgggtgccgcaggttcactgatggacgtgctgcatcatccaggcatgaaccaccgggtagaaatcacagaaggcatattggcggacgaatgtgcggcgctgttgtgtcgtttttttcgcatgcccaggcgggtctttaacgcccagaaaaaagcacaatcctctactgacggctcttctggatctgaaacacctggcacaagcgagagcgccacccctgagagctctggcgaggacatccaggctctgaaggctctggaacagtatgagaaagagcggcaagaacagctgctgcgggacaccctgaacaccaacgagtaccggctgagcaagagaggccttagaggctggcgggaaatcatccagaaatggctgaaaatggacgagaacgagccctccgagaagtacctggaagtgttcaaggactaccagcggaagcaccctagagaggccggcgattacagcgtgtacgagttcctgtccaagaaagagaaccacttcatctggcggaatcaccctgagtacccctacctgtacgccaccttctgcgagatcgacaagaaaaagaaggacgccaagcagcaggccaccttcacactggccgatcctatcaatcaccctctgtgggtccgattcgaggaaagaagcggcagcaacctgaacaagtacagaatcctgaccgagcagctgcacaccgagaagctgaagaaaaagctgacagtgcagctggaccggctgatctaccctacagaatctggcggctgggaagagaagggcaaagtggacattgtgctgctgcccagccggcagttctacaaccagatcttcctggacatcgaggaaaagggcaagcacgccttcacctacaaggatgagagcatcaagttccctctgaagggcacactcggcggagccagagtgcagttcgacagagatcacctgagaagataccctcacaaggtggaaagcggcaacgtgggcagaatctacttcaacatgaccgtgaacatcgagcctacagagtccccagtgtccaagtctctgaagatccaccgggacgacttccccaaggtggtcaacttcaagcccaaagaactgaccgagtggatcaaggacagcaagggcaagaaactgaagtccggcatcgagtccctggaaatcggcctgagagtgatgagcatcgacctgggacagagacaggccgctgccgcctctattttcgaggtggtggatcagaagcccgacatcgaaggcaagctgtttttcccaatcaagggcaccgagctgtatgccgtgcacagagccagcttcaacatcaagctgcccggcgagacactggtcaagagcagagaagtgctgcggaaggccagagaggacaatctgaaactgatgaaccagaagctcaacttcctgcggaacgtgctgcacttccagcagttcgaggacatcaccgagagagagaagcgggtcaccaagtggatcagcagacaagagaacagcgacgtgcccctggtgtaccaggatgagctgatccagatccgcgagctgatgtacaagccttacaaggactgggtcgccttcctgaagcagctccacaagagactggaagtcgagatcggcaaagaagtgaagcactggcggaagtccctgagcgacggaagaaagggcctgtacggcatctccctgaagaacatcgacgagatcgatcggacccggaagttcctgctgagatggtccctgaggcctaccgaacctggcgaagtgcgtagactggaacccggccagagattcgccatcgaccagctgaatcacctgaacgccctgaaagaagatcggctgaagaagatggccaacaccatcatcatgcacgccctgggctactgctacgacgtgcggaagaagaaatggcaggctaagaaccccgcctgccagatcatcctgttcgaggatctgagcaactacaacccctacgaggaaaggtcccgcttcgagaacagcaagctcatgaagtggtccagacgcgagatccccagacaggttgcactgcagggcgagatctatggcctgcaagtgggagaagtgggcgctcagttcagcagcagattccacgccaagacaggcagccctggcatcagatgtagcgtcgtgaccaaagagaagctgcaggacaatcggttcttcaagaatctgcagagagagggcagactgaccctggacaaaatcgccgtgctgaaagagggcgatctgtacccagacaaaggcggcgagaagttcatcagcctgagcaaggatcggaagtgcgtgaccacacacgccgacatcaacgccgctcagaacctgcagaagcggttctggacaagaacccacggcttctacaaggtgtactgcaaggcctaccaggtggacggccagaccgtgtacatccctgagagcaaggaccagaagcagaagatcatcgaagagttcggcgagggctacttcattctgaaggacggggtgtacgaatgggtcaacgccggcaagctgaaaatcaagaagggcagctccaagcagagcagcagcgagctggtggatagcgacatcctgaaagacagcttcgacctggcctccgagctgaaaggcgaaaagctgatgctgtacagggaccccagcggcaatgtgttccccagcgacaaatggatggccgctggcgtgttcttcggaaagctggaacgcatcctgatcagcaagctgaccaaccagtactccatcagcaccatcgaggacgacagcagcaagcagtctatgaaaaggccggcggccacgaaaaaggccggccaggcaaaaaagaaaaagggatcctacccatacgatgttccagattacgcttatccctacgacgtgcctgattatgcatacccatatgatgtccccgactatgcctaa

SEQ ID NO: 5 - protein, 1361 aa, synthetic construct
  REGION 1..1361: note = BhCas12b GGSGGS-ABE8-Xten20at K255 polypeptide sequence
MAPKKKRKVGIHGVPAAATRSFILKIEPNEEVKKGLWKTHEVLNHGIAYYMNILKLIRQEAIYEHHEQDPKNPKKVSKAEIQAELWDFVLKMQKCNSFTHEVDKDEVFNILRELYEELVPSSVEKKGEANQLSNKFLYPLVDPNSQSGKGTASSGRKPRWYNLKIAGDPSWEEEKKKWEEDKKKDPLAKILGKLAEYGLIPLFIPYTDSNEPIVKEIKWMEKSRNQSVRRLDKDMFIQALERFLSWESWNLKVKEEYEKVEKEYKTLEERIKGGSGGSSEVEFSHEYWMRHALTLAKRARDEREVPVGAVLVLNNRVIGEGWNRAIGLHDPTAHAEIMALRQGGLVMQNYRLYDATLYVTFEPCVMCAGAMIHSRIGRVVFGVRNAKTGAAGSLMDVLHHPGMNHRVEITEGILADECAALLCRFFRMPRRVFNAQKKAQSSTDGSSGSETPGTSESATPESSGEDIQALKALEQYEKERQEQLLRDTLNTNEYRLSKRGLRGWREIIQKWLKMDENEPSEKYLEVFKDYQRKHPREAGDYSVYEFLSKKENHFIWRNHPEYPYLYATFCEIDKKKKDAKQQATFTLADPINHPLWVRFEERSGSNLNKYRILTEQLHTEKLKKKLTVQLDRLIYPTESGGWEEKGKVDIVLLPSRQFYNQIFLDIEEKGKHAFTYKDESIKFPLKGTLGGARVQFDRDHLRRYPHKVESGNVGRIYFNMTVNIEPTESPVSKSLKIHRDDFPKVVNFKPKELTEWIKDSKGKKLKSGIESLEIGLRVMSIDLGQRQAAAASIFEVVDQKPDIEGKLFFPIKGTELYAVHRASFNIKLPGETLVKSREVLRKAREDNLKLMNQKLNFLRNVLHFQQFEDITEREKRVTKWISRQENSDVPLVYQDELIQIRELMYKPYKDWVAFLKQLHKRLEVEIGKEVKHWRKSLSDGRKGLYGISLKNIDEIDRTRKFLLRWSLRPTEPGEVRRLEPGQRFAIDQLNHLNALKEDRLKKMANTIIMHALGYCYDVRKKKWQAKNPACQIILFEDLSNYNPYEERSRFENSKLMKWSRREIPRQVALQGEIYGLQVGEVGAQFSSRFHAKTGSPGIRCSVVTKEKLQDNRFFKNLQREGRLTLDKIAVLKEGDLYPDKGGEKFISLSKDRKCVTTHADINAAQNLQKRFWTRTHGFYKVYCKAYQVDGQTVYIPESKDQKQKIIEEFGEGYFILKDGVYEWVNAGKLKIKKGSSKQSSSELVDSDILKDSFDLASELKGEKLMLYRDPSGNVFPSDKWMAAGVFFGKLERILISKLTNQYSISTIEDDSSKQSMKRPAATKKAGQAKKKKGSYPYDVPDYAYPYDVPDYAYPYDVPDYA

SEQ ID NO: 6 - DNA, 4092 bp, synthetic construct
  misc_feature 1..4092: note = BhCas12b GGSGGS-ABE8-Xten20at D306 polynucleotide sequence
  misc_feature 1..6: note = Kozak sequence
  misc_feature 7..57: note = Sequence encoding N-terminal nuclear localization signal (NLS)
  misc_feature 58..975: note = Sequence encoding BhCas12b
  misc_feature 976..993: note = Sequence encoding a linker
  misc_feature 994..1491: note = Sequence encoding TadA*8
  misc_feature 1492..1551: note = Sequence encoding Xten20 linker
  misc_feature 1552..3954: note = Sequence encoding BhCas12b
  misc_feature 3955..4002: note = Sequence encoding C-terminal NLS
  misc_feature 4003..4008: note = Sequence encoding a GS linker
  misc_feature 4009..4089: note = Sequence encoding 3x hemagglutinin (HA) tag
  source 1..4092: mol_type = other DNA
gccaccatggccccaaagaagaagcggaaggtcggtatccacggagtcccagcagccgccaccagatccttcatcctgaagatcgagcccaacgaggaagtgaagaaaggcctctggaaaacccacgaggtgctgaaccacggaatcgcctactacatgaatatcctgaagctgatccggcaagaggccatctacgagcaccacgagcaggaccccaagaatcccaagaaggtgtccaaggccgagatccaggccgagctgtgggatttcgtgctgaagatgcagaagtgcaacagcttcacacacgaggtggacaaggacgaggtgttcaacatcctgagagagctgtacgaggaactggtgcccagcagcgtggaaaagaagggcgaagccaaccagctgagcaacaagtttctgtaccctctggtggaccccaacagccagtctggaaagggaacagccagcagcggcagaaagcccagatggtacaacctgaagattgccggcgatccctcctgggaagaagagaagaagaagtgggaagaagataagaaaaaggacccgctggccaagatcctgggcaagctggctgagtacggactgatccctctgttcatcccctacaccgacagcaacgagcccatcgtgaaagaaatcaagtggatggaaaagtcccggaaccagagcgtgcggcggctggataaggacatgttcattcaggccctggaacggttcctgagctgggagagctggaacctgaaagtgaaagaggaatacgagaaggtcgagaaagagtacaagaccctggaagagaggatcaaagaggacatccaggctctgaaggctctggaacagtatgagaaagagcggcaagaacagctgctgcgggacaccctgaacaccaacgagtaccggctgagcaagagaggccttagaggctggcgggaaatcatccagaaatggctgaaaatggacggaggctctggaggaagctccgaagtcgagttttcccatgagtactggatgagacacgcattgactctcgcaaagagggctcgagatgaacgcgaggtgcccgtgggggcagtactcgtgctcaacaatcgcgtaatcggcgaaggttggaatagggcaatcggactccacgaccccactgcacatgcggaaatcatggcccttcgacagggagggcttgtgatgcagaattatcgactttatgatgcgacgctgtacgtcacgtttgaaccttgcgtaatgtgcgcgggagctatgattcactcccgcattggacgagttgtattcggtgttcgcaacgccaagacgggtgccgcaggttcactgatggacgtgctgcatcatccaggcatgaaccaccgggtagaaatcacagaaggcatattggcggacgaatgtgcggcgctgttgtgtcgtttttttcgcatgcccaggcgggtctttaacgcccagaaaaaagcacaatcctctactgacggctcttctggatctgaaacacctggcacaagcgagagcgccacccctgagagctctggcgagaacgagccctccgagaagtacctggaagtgttcaaggactaccagcggaagcaccctagagaggccggcgattacagcgtgtacgagttcctgtccaagaaagagaaccacttcatctggcggaatcaccctgagtacccctacctgtacgccaccttctgcgagatcgacaagaaaaagaaggacgccaagcagcaggccaccttcacactggccgatcctatcaatcaccctctgtgggtccgattcgaggaaagaagcggcagcaacctgaacaagtacagaatcctgaccgagcagctgcacaccgagaagctgaagaaaaagctgacagtgcagctggaccggctgatctaccctacagaatctggcggctgggaagagaagggcaaagtggacattgtgctgctgcccagccggcagttctacaaccagatcttcctggacatcgaggaaaagggcaagcacgccttcacctacaaggatgagagcatcaagttccctctgaagggcacactcggcggagccagagtgcagttcgacagagatcacctgagaagataccctcacaaggtggaaagcggcaacgtgggcagaatctacttcaacatgaccgtgaacatcgagcctacagagtccccagtgtccaagtctctgaagatccaccgggacgacttccccaaggtggtcaacttcaagcccaaagaactgaccgagtggatcaaggacagcaagggcaagaaactgaagtccggcatcgagtccctggaaatcggcctgagagtgatgagcatcgacctgggacagagacaggccgctgccgcctctattttcgaggtggtggatcagaagcccgacatcgaaggcaagctgtttttcccaatcaagggcaccgagctgtatgccgtgcacagagccagcttcaacatcaagctgcccggcgagacactggtcaagagcagagaagtgctgcggaaggccagagaggacaatctgaaactgatgaaccagaagctcaacttcctgcggaacgtgctgcacttccagcagttcgaggacatcaccgagagagagaagcgggtcaccaagtggatcagcagacaagagaacagcgacgtgcccctggtgtaccaggatgagctgatccagatccgcgagctgatgtacaagccttacaaggactgggtcgccttcctgaagcagctccacaagagactggaagtcgagatcggcaaagaagtgaagcactggcggaagtccctgagcgacggaagaaagggcctgtacggcatctccctgaagaacatcgacgagatcgatcggacccggaagttcctgctgagatggtccctgaggcctaccgaacctggcgaagtgcgtagactggaacccggccagagattcgccatcgaccagctgaatcacctgaacgccctgaaagaagatcggctgaagaagatggccaacaccatcatcatgcacgccctgggctactgctacgacgtgcggaagaagaaatggcaggctaagaaccccgcctgccagatcatcctgttcgaggatctgagcaactacaacccctacgaggaaaggtcccgcttcgagaacagcaagctcatgaagtggtccagacgcgagatccccagacaggttgcactgcagggcgagatctatggcctgcaagtgggagaagtgggcgctcagttcagcagcagattccacgccaagacaggcagccctggcatcagatgtagcgtcgtgaccaaagagaagctgcaggacaatcggttcttcaagaatctgcagagagagggcagactgaccctggacaaaatcgccgtgctgaaagagggcgatctgtacccagacaaaggcggcgagaagttcatcagcctgagcaaggatcggaagtgcgtgaccacacacgccgacatcaacgccgctcagaacctgcagaagcggttctggacaagaacccacggcttctacaaggtgtactgcaaggcctaccaggtggacggccagaccgtgtacatccctgagagcaaggaccagaagcagaagatcatcgaagagttcggcgagggctacttcattctgaaggacggggtgtacgaatgggtcaacgccggcaagctgaaaatcaagaagggcagctccaagcagagcagcagcgagctggtggatagcgacatcctgaaagacagcttcgacctggcctccgagctgaaaggcgaaaagctgatgctgtacagggaccccagcggcaatgtgttccccagcgacaaatggatggccgctggcgtgttcttcggaaagctggaacgcatcctgatcagcaagctgaccaaccagtactccatcagcaccatcgaggacgacagcagcaagcagtctatgaaaaggccggcggccacgaaaaaggccggccaggcaaaaaagaaaaagggatcctacccatacgatgttccagattacgcttatccctacgacgtgcctgattatgcatacccatatgatgtccccgactatgcctaa

SEQ ID NO: 7 - protein, 1361 aa, synthetic construct
  REGION 1..1361: note = BhCas12b GGSGGS-ABE8-Xten20at D306 polypeptide sequence
MAPKKKRKVGIHGVPAAATRSFILKIEPNEEVKKGLWKTHEVLNHGIAYYMNILKLIRQEAIYEHHEQDPKNPKKVSKAEIQAELWDFVLKMQKCNSFTHEVDKDEVFNILRELYEELVPSSVEKKGEANQLSNKFLYPLVDPNSQSGKGTASSGRKPRWYNLKIAGDPSWEEEKKKWEEDKKKDPLAKILGKLAEYGLIPLFIPYTDSNEPIVKEIKWMEKSRNQSVRRLDKDMFIQALERFLSWESWNLKVKEEYEKVEKEYKTLEERIKEDIQALKALEQYEKERQEQLLRDTLNTNEYRLSKRGLRGWREIIQKWLKMDGGSGGSSEVEFSHEYWMRHALTLAKRARDEREVPVGAVLVLNNRVIGEGWNRAIGLHDPTAHAEIMALRQGGLVMQNYRLYDATLYVTFEPCVMCAGAMIHSRIGRVVFGVRNAKTGAAGSLMDVLHHPGMNHRVEITEGILADECAALLCRFFRMPRRVFNAQKKAQSSTDGSSGSETPGTSESATPESSGENEPSEKYLEVFKDYQRKHPREAGDYSVYEFLSKKENHFIWRNHPEYPYLYATFCEIDKKKKDAKQQATFTLADPINHPLWVRFEERSGSNLNKYRILTEQLHTEKLKKKLTVQLDRLIYPTESGGWEEKGKVDIVLLPSRQFYNQIFLDIEEKGKHAFTYKDESIKFPLKGTLGGARVQFDRDHLRRYPHKVESGNVGRIYFNMTVNIEPTESPVSKSLKIHRDDFPKVVNFKPKELTEWIKDSKGKKLKSGIESLEIGLRVMSIDLGQRQAAAASIFEVVDQKPDIEGKLFFPIKGTELYAVHRASFNIKLPGETLVKSREVLRKAREDNLKLMNQKLNFLRNVLHFQQFEDITEREKRVTKWISRQENSDVPLVYQDELIQIRELMYKPYKDWVAFLKQLHKRLEVEIGKEVKHWRKSLSDGRKGLYGISLKNIDEIDRTRKFLLRWSLRPTEPGEVRRLEPGQRFAIDQLNHLNALKEDRLKKMANTIIMHALGYCYDVRKKKWQAKNPACQIILFEDLSNYNPYEERSRFENSKLMKWSRREIPRQVALQGEIYGLQVGEVGAQFSSRFHAKTGSPGIRCSVVTKEKLQDNRFFKNLQREGRLTLDKIAVLKEGDLYPDKGGEKFISLSKDRKCVTTHADINAAQNLQKRFWTRTHGFYKVYCKAYQVDGQTVYIPESKDQKQKIIEEFGEGYFILKDGVYEWVNAGKLKIKKGSSKQSSSELVDSDILKDSFDLASELKGEKLMLYRDPSGNVFPSDKWMAAGVFFGKLERILISKLTNQYSISTIEDDSSKQSMKRPAATKKAGQAKKKKGSYPYDVPDYAYPYDVPDYAYPYDVPDYA

SEQ ID NO: 8 - DNA, 4092 bp, synthetic construct
  misc_feature 1..4092: note = BhCas12b GGSGGS-ABE8-Xten20at D980 polynucleotide sequence
  misc_feature 1..6: note = Kozak sequence
  misc_feature 7..57: note = Sequence encoding N-terminal nuclear localization signal (NLS)
  misc_feature 58..2997: note = Sequence encoding BhCas12b
  misc_feature 2998..3015: note = Sequence encoding a linker
  misc_feature 3016..3513: note = Sequence encoding TadA*8
  misc_feature 3514..3573: note = Sequence encoding Xten20 linker
  misc_feature 3574..3954: note = Sequence encoding BhCas12b
  misc_feature 3955..4002: note = Sequence encoding C-terminal NLS
  misc_feature 4003..4008: note = Sequence encoding a GS linker
  misc_feature 4009..4089: note = Sequence encoding 3x hemagglutinin (HA) tag
  source 1..4092: mol_type = other DNA
gccaccatggccccaaagaagaagcggaaggtcggtatccacggagtcccagcagccgccaccagatccttcatcctgaagatcgagcccaacgaggaagtgaagaaaggcctctggaaaacccacgaggtgctgaaccacggaatcgcctactacatgaatatcctgaagctgatccggcaagaggccatctacgagcaccacgagcaggaccccaagaatcccaagaaggtgtccaaggccgagatccaggccgagctgtgggatttcgtgctgaagatgcagaagtgcaacagcttcacacacgaggtggacaaggacgaggtgttcaacatcctgagagagctgtacgaggaactggtgcccagcagcgtggaaaagaagggcgaagccaaccagctgagcaacaagtttctgtaccctctggtggaccccaacagccagtctggaaagggaacagccagcagcggcagaaagcccagatggtacaacctgaagattgccggcgatccctcctgggaagaagagaagaagaagtgggaagaagataagaaaaaggacccgctggccaagatcctgggcaagctggctgagtacggactgatccctctgttcatcccctacaccgacagcaacgagcccatcgtgaaagaaatcaagtggatggaaaagtcccggaaccagagcgtgcggcggctggataaggacatgttcattcaggccctggaacggttcctgagctgggagagctggaacctgaaagtgaaagaggaatacgagaaggtcgagaaagagtacaagaccctggaagagaggatcaaagaggacatccaggctctgaaggctctggaacagtatgagaaagagcggcaagaacagctgctgcgggacaccctgaacaccaacgagtaccggctgagcaagagaggccttagaggctggcgggaaatcatccagaaatggctgaaaatggacgagaacgagccctccgagaagtacctggaagtgttcaaggactaccagcggaagcaccctagagaggccggcgattacagcgtgtacgagttcctgtccaagaaagagaaccacttcatctggcggaatcaccctgagtacccctacctgtacgccaccttctgcgagatcgacaagaaaaagaaggacgccaagcagcaggccaccttcacactggccgatcctatcaatcaccctctgtgggtccgattcgaggaaagaagcggcagcaacctgaacaagtacagaatcctgaccgagcagctgcacaccgagaagctgaagaaaaagctgacagtgcagctggaccggctgatctaccctacagaatctggcggctgggaagagaagggcaaagtggacattgtgctgctgcccagccggcagttctacaaccagatcttcctggacatcgaggaaaagggcaagcacgccttcacctacaaggatgagagcatcaagttccctctgaagggcacactcggcggagccagagtgcagttcgacagagatcacctgagaagataccctcacaaggtggaaagcggcaacgtgggcagaatctacttcaacatgaccgtgaacatcgagcctacagagtccccagtgtccaagtctctgaagatccaccgggacgacttccccaaggtggtcaacttcaagcccaaagaactgaccgagtggatcaaggacagcaagggcaagaaactgaagtccggcatcgagtccctggaaatcggcctgagagtgatgagcatcgacctgggacagagacaggccgctgccgcctctattttcgaggtggtggatcagaagcccgacatcgaaggcaagctgtttttcccaatcaagggcaccgagctgtatgccgtgcacagagccagcttcaacatcaagctgcccggcgagacactggtcaagagcagagaagtgctgcggaaggccagagaggacaatctgaaactgatgaaccagaagctcaacttcctgcggaacgtgctgcacttccagcagttcgaggacatcaccgagagagagaagcgggtcaccaagtggatcagcagacaagagaacagcgacgtgcccctggtgtaccaggatgagctgatccagatccgcgagctgatgtacaagccttacaaggactgggtcgccttcctgaagcagctccacaagagactggaagtcgagatcggcaaagaagtgaagcactggcggaagtccctgagcgacggaagaaagggcctgtacggcatctccctgaagaacatcgacgagatcgatcggacccggaagttcctgctgagatggtccctgaggcctaccgaacctggcgaagtgcgtagactggaacccggccagagattcgccatcgaccagctgaatcacctgaacgccctgaaagaagatcggctgaagaagatggccaacaccatcatcatgcacgccctgggctactgctacgacgtgcggaagaagaaatggcaggctaagaaccccgcctgccagatcatcctgttcgaggatctgagcaactacaacccctacgaggaaaggtcccgcttcgagaacagcaagctcatgaagtggtccagacgcgagatccccagacaggttgcactgcagggcgagatctatggcctgcaagtgggagaagtgggcgctcagttcagcagcagattccacgccaagacaggcagccctggcatcagatgtagcgtcgtgaccaaagagaagctgcaggacaatcggttcttcaagaatctgcagagagagggcagactgaccctggacaaaatcgccgtgctgaaagagggcgatctgtacccagacaaaggcggcgagaagttcatcagcctgagcaaggatcggaagtgcgtgaccacacacgccgacatcaacgccgctcagaacctgcagaagcggttctggacaagaacccacggcttctacaaggtgtactgcaaggcctaccaggtggacggaggctctggaggaagctccgaagtcgagttttcccatgagtactggatgagacacgcattgactctcgcaaagagggctcgagatgaacgcgaggtgcccgtgggggcagtactcgtgctcaacaatcgcgtaatcggcgaaggttggaatagggcaatcggactccacgaccccactgcacatgcggaaatcatggcccttcgacagggagggcttgtgatgcagaattatcgactttatgatgcgacgctgtacgtcacgtttgaaccttgcgtaatgtgcgcgggagctatgattcactcccgcattggacgagttgtattcggtgttcgcaacgccaagacgggtgccgcaggttcactgatggacgtgctgcatcatccaggcatgaaccaccgggtagaaatcacagaaggcatattggcggacgaatgtgcggcgctgttgtgtcgtttttttcgcatgcccaggcgggtctttaacgcccagaaaaaagcacaatcctctactgacggctcttctggatctgaaacacctggcacaagcgagagcgccacccctgagagctctggcggccagaccgtgtacatccctgagagcaaggaccagaagcagaagatcatcgaagagttcggcgagggctacttcattctgaaggacggggtgtacgaatgggtcaacgccggcaagctgaaaatcaagaagggcagctccaagcagagcagcagcgagctggtggatagcgacatcctgaaagacagcttcgacctggcctccgagctgaaaggcgaaaagctgatgctgtacagggaccccagcggcaatgtgttccccagcgacaaatggatggccgctggcgtgttcttcggaaagctggaacgcatcctgatcagcaagctgaccaaccagtactccatcagcaccatcgaggacgacagcagcaagcagtctatgaaaaggccggcggccacgaaaaaggccggccaggcaaaaaagaaaaagggatcctacccatacgatgttccagattacgcttatccctacgacgtgcctgattatgcatacccatatgatgtccccgactatgcctaa

SEQ ID NO: 9 - protein, 1361 aa, synthetic construct
  REGION 1..1361: note = BhCas12b GGSGGS-ABE8-Xten20at D980 polypeptide sequence
MAPKKKRKVGIHGVPAAATRSFILKIEPNEEVKKGLWKTHEVLNHGIAYYMNILKLIRQEAIYEHHEQDPKNPKKVSKAEIQAELWDFVLKMQKCNSFTHEVDKDEVFNILRELYEELVPSSVEKKGEANQLSNKFLYPLVDPNSQSGKGTASSGRKPRWYNLKIAGDPSWEEEKKKWEEDKKKDPLAKILGKLAEYGLIPLFIPYTDSNEPIVKEIKWMEKSRNQSVRRLDKDMFIQALERFLSWESWNLKVKEEYEKVEKEYKTLEERIKEDIQALKALEQYEKERQEQLLRDTLNTNEYRLSKRGLRGWREIIQKWLKMDENEPSEKYLEVFKDYQRKHPREAGDYSVYEFLSKKENHFIWRNHPEYPYLYATFCEIDKKKKDAKQQATFTLADPINHPLWVRFEERSGSNLNKYRILTEQLHTEKLKKKLTVQLDRLIYPTESGGWEEKGKVDIVLLPSRQFYNQIFLDIEEKGKHAFTYKDESIKFPLKGTLGGARVQFDRDHLRRYPHKVESGNVGRIYFNMTVNIEPTESPVSKSLKIHRDDFPKVVNFKPKELTEWIKDSKGKKLKSGIESLEIGLRVMSIDLGQRQAAAASIFEVVDQKPDIEGKLFFPIKGTELYAVHRASFNIKLPGETLVKSREVLRKAREDNLKLMNQKLNFLRNVLHFQQFEDITEREKRVTKWISRQENSDVPLVYQDELIQIRELMYKPYKDWVAFLKQLHKRLEVEIGKEVKHWRKSLSDGRKGLYGISLKNIDEIDRTRKFLLRWSLRPTEPGEVRRLEPGQRFAIDQLNHLNALKEDRLKKMANTIIMHALGYCYDVRKKKWQAKNPACQIILFEDLSNYNPYEERSRFENSKLMKWSRREIPRQVALQGEIYGLQVGEVGAQFSSRFHAKTGSPGIRCSVVTKEKLQDNRFFKNLQREGRLTLDKIAVLKEGDLYPDKGGEKFISLSKDRKCVTTHADINAAQNLQKRFWTRTHGFYKVYCKAYQVDGGSGGSSEVEFSHEYWMRHALTLAKRARDEREVPVGAVLVLNNRVIGEGWNRAIGLHDPTAHAEIMALRQGGLVMQNYRLYDATLYVTFEPCVMCAGAMIHSRIGRVVFGVRNAKTGAAGSLMDVLHHPGMNHRVEITEGILADECAALLCRFFRMPRRVFNAQKKAQSSTDGSSGSETPGTSESATPESSGGQTVYIPESKDQKQKIIEEFGEGYFILKDGVYEWVNAGKLKIKKGSSKQSSSELVDSDILKDSFDLASELKGEKLMLYRDPSGNVFPSDKWMAAGVFFGKLERILISKLTNQYSISTIEDDSSKQSMKRPAATKKAGQAKKKKGSYPYDVPDYAYPYDVPDYAYPYDVPDYA

SEQ ID NO: 10 - DNA, 4092 bp, synthetic construct
  misc_feature 1..4092: note = BhCas12b GGSGGS-ABE8-Xten20at K1019 polynucleotide sequence
  misc_feature 1..6: note = Kozak sequence
  misc_feature 7..57: note = Sequence encoding N-terminal nuclear localization signal (NLS)
  misc_feature 58..3114: note = Sequence encoding BhCas12b
  misc_feature 3115..3132: note = Sequence encoding a linker
  misc_feature 3133..3630: note = Sequence encoding TadA*8
  misc_feature 3631..3690: note = Sequence encoding Xten20 linker
  misc_feature 3691..3954: note = Sequence encoding BhCas12b
  misc_feature 3955..4002: note = Sequence encoding C-terminal NLS
  misc_feature 4003..4008: note = Sequence encoding GS linker
  misc_feature 4009..4089: note = Sequence encoding 3x hemagglutinin (HA) tag
  source 1..4092: mol_type = other DNA
gccaccatggccccaaagaagaagcggaaggtcggtatccacggagtcccagcagccgccaccagatccttcatcctgaagatcgagcccaacgaggaagtgaagaaaggcctctggaaaacccacgaggtgctgaaccacggaatcgcctactacatgaatatcctgaagctgatccggcaagaggccatctacgagcaccacgagcaggaccccaagaatcccaagaaggtgtccaaggccgagatccaggccgagctgtgggatttcgtgctgaagatgcagaagtgcaacagcttcacacacgaggtggacaaggacgaggtgttcaacatcctgagagagctgtacgaggaactggtgcccagcagcgtggaaaagaagggcgaagccaaccagctgagcaacaagtttctgtaccctctggtggaccccaacagccagtctggaaagggaacagccagcagcggcagaaagcccagatggtacaacctgaagattgccggcgatccctcctgggaagaagagaagaagaagtgggaagaagataagaaaaaggacccgctggccaagatcctgggcaagctggctgagtacggactgatccctctgttcatcccctacaccgacagcaacgagcccatcgtgaaagaaatcaagtggatggaaaagtcccggaaccagagcgtgcggcggctggataaggacatgttcattcaggccctggaacggttcctgagctgggagagctggaacctgaaagtgaaagaggaatacgagaaggtcgagaaagagtacaagaccctggaagagaggatcaaagaggacatccaggctctgaaggctctggaacagtatgagaaagagcggcaagaacagctgctgcgggacaccctgaacaccaacgagtaccggctgagcaagagaggccttagaggctggcgggaaatcatccagaaatggctgaaaatggacgagaacgagccctccgagaagtacctggaagtgttcaaggactaccagcggaagcaccctagagaggccggcgattacagcgtgtacgagttcctgtccaagaaagagaaccacttcatctggcggaatcaccctgagtacccctacctgtacgccaccttctgcgagatcgacaagaaaaagaaggacgccaagcagcaggccaccttcacactggccgatcctatcaatcaccctctgtgggtccgattcgaggaaagaagcggcagcaacctgaacaagtacagaatcctgaccgagcagctgcacaccgagaagctgaagaaaaagctgacagtgcagctggaccggctgatctaccctacagaatctggcggctgggaagagaagggcaaagtggacattgtgctgctgcccagccggcagttctacaaccagatcttcctggacatcgaggaaaagggcaagcacgccttcacctacaaggatgagagcatcaagttccctctgaagggcacactcggcggagccagagtgcagttcgacagagatcacctgagaagataccctcacaaggtggaaagcggcaacgtgggcagaatctacttcaacatgaccgtgaacatcgagcctacagagtccccagtgtccaagtctctgaagatccaccgggacgacttccccaaggtggtcaacttcaagcccaaagaactgaccgagtggatcaaggacagcaagggcaagaaactgaagtccggcatcgagtccctggaaatcggcctgagagtgatgagcatcgacctgggacagagacaggccgctgccgcctctattttcgaggtggtggatcagaagcccgacatcgaaggcaagctgtttttcccaatcaagggcaccgagctgtatgccgtgcacagagccagcttcaacatcaagctgcccggcgagacactggtcaagagcagagaagtgctgcggaaggccagagaggacaatctgaaactgatgaaccagaagctcaacttcctgcggaacgtgctgcacttccagcagttcgaggacatcaccgagagagagaagcgggtcaccaagtggatcagcagacaagagaacagcgacgtgcccctggtgtaccaggatgagctgatccagatccgcgagctgatgtacaagccttacaaggactgggtcgccttcctgaagcagctccacaagagactggaagtcgagatcggcaaagaagtgaagcactggcggaagtccctgagcgacggaagaaagggcctgtacggcatctccctgaagaacatcgacgagatcgatcggacccggaagttcctgctgagatggtccctgaggcctaccgaacctggcgaagtgcgtagactggaacccggccagagattcgccatcgaccagctgaatcacctgaacgccctgaaagaagatcggctgaagaagatggccaacaccatcatcatgcacgccctgggctactgctacgacgtgcggaagaagaaatggcaggctaagaaccccgcctgccagatcatcctgttcgaggatctgagcaactacaacccctacgaggaaaggtcccgcttcgagaacagcaagctcatgaagtggtccagacgcgagatccccagacaggttgcactgcagggcgagatctatggcctgcaagtgggagaagtgggcgctcagttcagcagcagattccacgccaagacaggcagccctggcatcagatgtagcgtcgtgaccaaagagaagctgcaggacaatcggttcttcaagaatctgcagagagagggcagactgaccctggacaaaatcgccgtgctgaaagagggcgatctgtacccagacaaaggcggcgagaagttcatcagcctgagcaaggatcggaagtgcgtgaccacacacgccgacatcaacgccgctcagaacctgcagaagcggttctggacaagaacccacggcttctacaaggtgtactgcaaggcctaccaggtggacggccagaccgtgtacatccctgagagcaaggaccagaagcagaagatcatcgaagagttcggcgagggctacttcattctgaaggacggggtgtacgaatgggtcaacgccggcaagggaggctctggaggaagctccgaagtcgagttttcccatgagtactggatgagacacgcattgactctcgcaaagagggctcgagatgaacgcgaggtgcccgtgggggcagtactcgtgctcaacaatcgcgtaatcggcgaaggttggaatagggcaatcggactccacgaccccactgcacatgcggaaatcatggcccttcgacagggagggcttgtgatgcagaattatcgactttatgatgcgacgctgtacgtcacgtttgaaccttgcgtaatgtgcgcgggagctatgattcactcccgcattggacgagttgtattcggtgttcgcaacgccaagacgggtgccgcaggttcactgatggacgtgctgcatcatccaggcatgaaccaccgggtagaaatcacagaaggcatattggcggacgaatgtgcggcgctgttgtgtcgtttttttcgcatgcccaggcgggtctttaacgcccagaaaaaagcacaatcctctactgacggctcttctggatctgaaacacctggcacaagcgagagcgccacccctgagagctctggcctgaaaatcaagaagggcagctccaagcagagcagcagcgagctggtggatagcgacatcctgaaagacagcttcgacctggcctccgagctgaaaggcgaaaagctgatgctgtacagggaccccagcggcaatgtgttccccagcgacaaatggatggccgctggcgtgttcttcggaaagctggaacgcatcctgatcagcaagctgaccaaccagtactccatcagcaccatcgaggacgacagcagcaagcagtctatgaaaaggccggcggccacgaaaaaggccggccaggcaaaaaagaaaaagggatcctacccatacgatgttccagattacgcttatccctacgacgtgcctgattatgcatacccatatgatgtccccgactatgcctaa

SEQ ID NO: 11 - protein, 1361 aa, synthetic construct
  REGION 1..1361: note = BhCas12b GGSGGS-ABE8-Xten20at K1019 polypeptide sequence
MAPKKKRKVGIHGVPAAATRSFILKIEPNEEVKKGLWKTHEVLNHGIAYYMNILKLIRQEAIYEHHEQDPKNPKKVSKAEIQAELWDFVLKMQKCNSFTHEVDKDEVFNILRELYEELVPSSVEKKGEANQLSNKFLYPLVDPNSQSGKGTASSGRKPRWYNLKIAGDPSWEEEKKKWEEDKKKDPLAKILGKLAEYGLIPLFIPYTDSNEPIVKEIKWMEKSRNQSVRRLDKDMFIQALERFLSWESWNLKVKEEYEKVEKEYKTLEERIKEDIQALKALEQYEKERQEQLLRDTLNTNEYRLSKRGLRGWREIIQKWLKMDENEPSEKYLEVFKDYQRKHPREAGDYSVYEFLSKKENHFIWRNHPEYPYLYATFCEIDKKKKDAKQQATFTLADPINHPLWVRFEERSGSNLNKYRILTEQLHTEKLKKKLTVQLDRLIYPTESGGWEEKGKVDIVLLPSRQFYNQIFLDIEEKGKHAFTYKDESIKFPLKGTLGGARVQFDRDHLRRYPHKVESGNVGRIYFNMTVNIEPTESPVSKSLKIHRDDFPKVVNFKPKELTEWIKDSKGKKLKSGIESLEIGLRVMSIDLGQRQAAAASIFEVVDQKPDIEGKLFFPIKGTELYAVHRASFNIKLPGETLVKSREVLRKAREDNLKLMNQKLNFLRNVLHFQQFEDITEREKRVTKWISRQENSDVPLVYQDELIQIRELMYKPYKDWVAFLKQLHKRLEVEIGKEVKHWRKSLSDGRKGLYGISLKNIDEIDRTRKFLLRWSLRPTEPGEVRRLEPGQRFAIDQLNHLNALKEDRLKKMANTIIMHALGYCYDVRKKKWQAKNPACQIILFEDLSNYNPYEERSRFENSKLMKWSRREIPRQVALQGEIYGLQVGEVGAQFSSRFHAKTGSPGIRCSVVTKEKLQDNRFFKNLQREGRLTLDKIAVLKEGDLYPDKGGEKFISLSKDRKCVTTHADINAAQNLQKRFWTRTHGFYKVYCKAYQVDGQTVYIPESKDQKQKIIEEFGEGYFILKDGVYEWVNAGKGGSGGSSEVEFSHEYWMRHALTLAKRARDEREVPVGAVLVLNNRVIGEGWNRAIGLHDPTAHAEIMALRQGGLVMQNYRLYDATLYVTFEPCVMCAGAMIHSRIGRVVFGVRNAKTGAAGSLMDVLHHPGMNHRVEITEGILADECAALLCRFFRMPRRVFNAQKKAQSSTDGSSGSETPGTSESATPESSGLKIKKGSSKQSSSELVDSDILKDSFDLASELKGEKLMLYRDPSGNVFPSDKWMAAGVFFGKLERILISKLTNQYSISTIEDDSSKQSMKRPAATKKAGQAKKKKGSYPYDVPDYAYPYDVPDYAYPYDVPDYA

SEQ ID NO: 12 - protein, 208 aa, Petromyzon marinus
  REGION 1..208: note = MISC_FEATURE - tr|A5H718|A5H718_PETMA Cytosine deaminase OS=Petromyzon marinusOX=7757 PE=2 SV=1 amino acid sequence; PmCDA1 polypeptide sequence
MTDAEYVRIHEKLDIYTFKKQFFNNKKSVSHRCYVLFELKRRGERRACFWGYAVNKPQSGTERGIHAEIFSIRKVEEYLRDNPGQFTINWYSSWSPCADCAEKILEWYNQELRGNGHTLKIWACKLYYEKNARNQIGLWNLRDNGVGLNVMVSEHYQCCRKIFIQSSHNQLNENRWLEKTLKRAEKRRSELSIMIQVKILHTTKSPAV

SEQ ID NO: 13 - DNA, 766 bp, Petromyzon marinus
  misc_feature 1..766: note = EF094822.1 Petromyzon marinus isolate PmCDA.21 cytosine deaminase mRNA, complete cds; PmCDA1 polynucleotide sequence
  source 1..766: mol_type = genomic DNA
tgacacgacacagccgtgtatatgaggaagggtagctggatggggggggggggaatacgttcagagaggacattagcgagcgtcttgttggtggccttgagtctagacacctgcagacatgaccgacgctgagtacgtgagaatccatgagaagttggacatctacacgtttaagaaacagtttttcaacaacaaaaaatccgtgtcgcatagatgctacgttctctttgaattaaaacgacggggtgaacgtagagcgtgtttttggggctatgctgtgaataaaccacagagcgggacagaacgtggaattcacgccgaaatctttagcattagaaaagtcgaagaatacctgcgcgacaaccccggacaattcacgataaattggtactcatcctggagtccttgtgcagattgcgctgaaaagatcttagaatggtataaccaggagctgcgggggaacggccacactttgaaaatctgggcttgcaaactctattacgagaaaaatgcgaggaatcaaattgggctgtggaacctcagagataacggggttgggttgaatgtaatggtaagtgaacactaccaatgttgcaggaaaatattcatccaatcgtcgcacaatcaattgaatgagaatagatggcttgagaagactttgaagcgagctgaaaaacgacggagcgagttgtccattatgattcaggtaaaaatactccacaccactaagagtcctgctgtttaagaggctatgcggatggttttc

SEQ ID NO: 14 - protein, 145 aa, Homo sapiens
  REGION 1..145: note = MISC_FEATURE - tr|Q6QJ80|Q6QJ80_HUMAN Activation-induced cytidine deaminase OS=Homo sapiens; OX = 9606 GN=AICDA PE=2 SV=1; AID polypeptide sequence
MDSLLMNRRKFLYQFKNVRWAKGRRETYLCYVVKRRDSATSFSLDFGYLRNKNGCHVELLFLRYISDWDLDPGRCYRVTWFTSWSPCYDCARHVADFLRGNPNLSLRIFTARLYFCEDRKAEPEGLRRLHRAGVQIAIMTFKAPV

SEQ ID NO: 15 - DNA, 10681 bp, Homo sapiens
  misc_feature 1..10681: note = NG_011588.1:5001-15681 Homo sapiens activation induced cytidine deaminase (AICDA), RefSeqGene (LRG_17) on chromosome 12; nucleic acid sequence of the CDS of human AID; polynucleotide sequence
  source 1..10681: mol_type = genomic DNA
agagaaccatcattaattgaagtgagatttttctggcctgagacttgcagggaggcaagaagacactctggacaccactatggacaggtaaagaggcagtcttctcgtgggtgattgcactggccttcctctcagagcaaatctgagtaatgagactggtagctatccctttctctcatgtaactgtctgactgataagatcagcttgatcaatatgcatatatattttttgatctgtctccttttcttctattcagatcttatacgctgtcagcccaattctttctgtttcagacttctcttgatttccctctttttcatgtggcaaaagaagtagtgcgtacaatgtactgattcgtcctgagatttgtaccatggttgaaactaatttatggtaataatattaacatagcaaatctttagagactcaaatcatgaaaaggtaatagcagtactgtactaaaaacggtagtgctaattttcgtaataattttgtaaatattcaacagtaaaacaacttgaagacacactttcctagggaggcgttactgaaataatttagctatagtaagaaaatttgtaattttagaaatgccaagcattctaaattaattgcttgaaagtcactatgattgtgtccattataaggagacaaattcattcaagcaagttatttaatgttaaaggcccaattgttaggcagttaatggcacttttactattaactaatctttccatttgttcagacgtagcttaacttacctcttaggtgtgaatttggttaaggtcctcataatgtctttatgtgcagtttttgataggttattgtcatagaacttattctattcctacatttatgattactatggatgtatgagaataacacctaatccttatactttacctcaatttaactcctttataaagaacttacattacagaataaagattttttaaaaatatatttttttgtagagacagggtcttagcccagccgaggctggtctctaagtcctggcccaagcgatcctcctgcctgggcctcctaaagtgctggaattatagacatgagccatcacatccaatatacagaataaagatttttaatggaggatttaatgttcttcagaaaattttcttgaggtcagacaatgtcaaatgtctcctcagtttacactgagattttgaaaacaagtctgagctataggtccttgtgaagggtccattggaaatacttgttcaaagtaaaatggaaagcaaaggtaaaatcagcagttgaaattcagagaaagacagaaaaggagaaaagatgaaattcaacaggacagaagggaaatatattatcattaaggaggacagtatctgtagagctcattagtgatggcaaaatgacttggtcaggattatttttaacccgcttgtttctggtttgcacggctggggatgcagctagggttctgcctcagggagcacagctgtccagagcagctgtcagcctgcaagcctgaaacactccctcggtaaagtccttcctactcaggacagaaatgacgagaacagggagctggaaacaggcccctaaccagagaagggaagtaatggatcaacaaagttaactagcaggtcaggatcacgcaattcatttcactctgactggtaacatgtgacagaaacagtgtaggcttattgtattttcatgtagagtaggacccaaaaatccacccaaagtcctttatctatgccacatccttcttatctatacttccaggacactttttcttccttatgataaggctctctctctctccacacacacacacacacacacacacacacacacacacacacacacaaacacacaccccgccaaccaaggtgcatgtaaaaagatgtagattcctctgcctttctcatctacacagcccaggagggtaagttaatataagagggatttattggtaagagatgatgcttaatctgtttaacactgggcctcaaagagagaatttcttttcttctgtacttattaagcacctattatgtgttgagcttatatatacaaagggttattatatgctaatatagtaatagtaatggtggttggtactatggtaattaccataaaaattattatccttttaaaataaagctaattattattggatcttttttagtattcattttatgttttttatgtttttgattttttaaaagacaatctcaccctgttacccaggctggagtgcagtggtgcaatcatagctttctgcagtcttgaactcctgggctcaagcaatcctcctgccttggcctcccaaagtgttgggatacagtcatgagccactgcatctggcctaggatccatttagattaaaatatgcattttaaattttaaaataatatggctaatttttaccttatgtaatgtgtatactggcaataaatctagtttgctgcctaaagtttaaagtgctttccagtaagcttcatgtacgtgaggggagacatttaaagtgaaacagacagccaggtgtggtggctcacgcctgtaatcccagcactctgggaggctgaggtgggtggatcgcttgagccctggagttcaagaccagcctgagcaacatggcaaaacgctgtttctataacaaaaattagccgggcatggtggcatgtgcctgtggtcccagctactagggggctgaggcaggagaatcgttggagcccaggaggtcaaggctgcactgagcagtgcttgcgccactgcactccagcctgggtgacaggaccagaccttgcctcaaaaaaataagaagaaaaattaaaaataaatggaaacaactacaaagagctgttgtcctagatgagctacttagttaggctgatattttggtatttaacttttaaagtcagggtctgtcacctgcactacattattaaaatatcaattctcaatgtatatccacacaaagactggtacgtgaatgttcatagtacctttattcacaaaaccccaaagtagagactatccaaatatccatcaacaagtgaacaaataaacaaaatgtgctatatccatgcaatggaataccaccctgcagtacaaagaagctacttggggatgaatcccaaagtcatgacgctaaatgaaagagtcagacatgaaggaggagataatgtatgccatacgaaattctagaaaatgaaagtaacttatagttacagaaagcaaatcagggcaggcatagaggctcacacctgtaatcccagcactttgagaggccacgtgggaagattgctagaactcaggagttcaagaccagcctgggcaacacagtgaaactccattctccacaaaaatgggaaaaaaagaaagcaaatcagtggttgtcctgtggggaggggaaggactgcaaagagggaagaagctctggtggggtgagggtggtgattcaggttctgtatcctgactgtggtagcagtttggggtgtttacatccaaaaatattcgtagaattatgcatcttaaatgggtggagtttactgtatgtaaattatacctcaatgtaagaaaaaataatgtgtaagaaaactttcaattctcttgccagcaaacgttattcaaattcctgagccctttacttcgcaaattctctgcacttctgccccgtaccattaggtgacagcactagctccacaaattggataaatgcatttctggaaaagactagggacaaaatccaggcatcacttgtgctttcatatcaaccatgctgtacagcttgtgttgctgtctgcagctgcaatggggactcttgatttctttaaggaaacttgggttaccagagtatttccacaaatgctattcaaattagtgcttatgatatgcaagacactgtgctaggagccagaaaacaaagaggaggagaaatcagtcattatgtgggaacaacatagcaagatatttagatcattttgactagttaaaaaagcagcagagtacaaaatcacacatgcaatcagtataatccaaatcatgtaaatatgtgcctgtagaaagactagaggaataaacacaagaatcttaacagtcattgtcattagacactaagtctaattattattattagacactatgatatttgagatttaaaaaatctttaatattttaaaatttagagctcttctatttttccatagtattcaagtttgacaatgatcaagtattactctttctttttttttttttttttttttttttgagatggagttttggtcttgttgcccatgctggagtggaatggcatgaccatagctcactgcaacctccacctcctgggttcaagcaaagctgtcgcctcagcctcccgggtagatgggattacaggcgcccaccaccacactcggctaatgtttgtatttttagtagagatggggtttcaccatgttggccaggctggtctcaaactcctgacctcagaggatccacctgcctcagcctcccaaagtgctgggattacagatgtaggccactgcgcccggccaagtattgctcttatacattaaaaaacaggtgtgagccactgcgcccagccaggtattgctcttatacattaaaaaataggccggtgcagtggctcacgcctgtaatcccagcactttgggaagccaaggcgggcagaacacccgaggtcaggagtccaaggccagcctggccaagatggtgaaaccccgtctctattaaaaatacaaacattacctgggcatgatggtgggcgcctgtaatcccagctactcaggaggctgaggcaggaggatccgcggagcctggcagatctgcctgagcctgggaggttgaggctacagtaagccaagatcatgccagtatacttcagcctgggcgacaaagtgagaccgtaacaaaaaaaaaaaaatttaaaaaaagaaatttagatcaagatccaactgtaaaaagtggcctaaacaccacattaaagagtttggagtttattctgcaggcagaagagaaccatcagggggtcttcagcatgggaatggcatggtgcacctggtttttgtgagatcatggtggtgacagtgtggggaatgttattttggagggactggaggcagacagaccggttaaaaggccagcacaacagataaggaggaagaagatgagggcttggaccgaagcagagaagagcaaacagggaaggtacaaattcaagaaatattggggggtttgaatcaacacatttagatgattaattaaatatgaggactgaggaataagaaatgagtcaaggatggttccaggctgctaggctgcttacctgaggtggcaaagtcgggaggagtggcagtttaggacagggggcagttgaggaatattgttttgatcattttgagtttgaggtacaagttggacacttaggtaaagactggaggggaaatctgaatatacaattatgggactgaggaacaagtttattttattttttgtttcgttttcttgttgaagaacaaatttaattgtaatcccaagtcatcagcatctagaagacagtggcaggaggtgactgtcttgtgggtaagggtttggggtccttgatgagtatctctcaattggccttaaatataagcaggaaaaggagtttatgatggattccaggctcagcagggctcaggagggctcaggcagccagcagaggaagtcagagcatcttctttggtttagcccaagtaatgacttccttaaaaagctgaaggaaaatccagagtgaccagattataaactgtactcttgcattttctctccctcctctcacccacagcctcttgatgaaccggaggaagtttctttaccaattcaaaaatgtccgctgggctaagggtcggcgtgagacctacctgtgctacgtagtgaagaggcgtgacagtgctacatccttttcactggactttggttatcttcgcaataaggtatcaattaaagtcggctttgcaagcagtttaatggtcaactgtgagtgcttttagagccacctgctgatggtattacttccatccttttttggcatttgtgtctctatcacattcctcaaatccttttttttatttctttttccatgtccatgcacccatattagacatggcccaaaatatgtgatttaattcctccccagtaatgctgggcaccctaataccactccttccttcagtgccaagaacaactgctcccaaactgtttaccagctttcctcagcatctgaattgcctttgagattaattaagctaaaagcatttttatatgggagaatattatcagcttgtccaagcaaaaattttaaatgtgaaaaacaaattgtgtcttaagcatttttgaaaattaaggaagaagaatttgggaaaaaattaacggtggctcaattctgtcttccaaatgatttcttttccctcctactcacatgggtcgtaggccagtgaatacattcaacatggtgatccccagaaaactcagagaagcctcggctgatgattaattaaattgatctttcggctacccgagagaattacatttccaagagacttcttcaccaaaatccagatgggtttacataaacttctgcccacgggtatctcctctctcctaacacgctgtgacgtctgggcttggtggaatctcagggaagcatccgtggggtggaaggtcatcgtctggctcgttgtttgatggttatattaccatgcaattttctttgcctacatttgtattgaatacatcccaatctccttcctattcggtgacatgacacattctatttcagaaggctttgattttatcaagcactttcatttacttctcatggcagtgcctattacttctcttacaatacccatctgtctgctttaccaaaatctatttccccttttcagatcctcccaaatggtcctcataaactgtcctgcctccacctagtggtccaggtatatttccacaatgttacatcaacaggcacttctagccattttccttctcaaaaggtgcaaaaagcaacttcataaacacaaattaaatcttcggtgaggtagtgtgatgctgcttcctcccaactcagcgcacttcgtcttcctcattccacaaaaacccatagccttccttcactctgcaggactagtgctgccaagggttcagctctacctactggtgtgctcttttgagcaagttgcttagcctctctgtaacacaaggacaatagctgcaagcatccccaaagatcattgcaggagacaatgactaaggctaccagagccgcaataaaagtcagtgaattttagcgtggtcctctctgtctctccagaacggctgccacgtggaattgctcttcctccgctacatctcggactgggacctagaccctggccgctgctaccgcgtcacctggttcacctcctggagcccctgctacgactgtgcccgacatgtggccgactttctgcgagggaaccccaacctcagtctgaggatcttcaccgcgcgcctctacttctgtgaggaccgcaaggctgagcccgaggggctgcggcggctgcaccgcgccggggtgcaaatagccatcatgaccttcaaaggtgcgaaagggccttccgcgcaggcgcagtgcagcagcccgcattcgggattgcgatgcggaatgaatgagttagtggggaagctcgaggggaagaagtgggcggggattctggttcacctctggagccgaaattaaagattagaagcagagaaaagagtgaatggctcagagacaaggccccgaggaaatgagaaaatggggccagggttgcttctttcccctcgatttggaacctgaactgtcttctacccccatatccccgcctttttttcctttttttttttttgaagattatttttactgctggaatacttttgtagaaaaccacgaaagaactttcaaagcctgggaagggctgcatgaaaattcagttcgtctctccagacagcttcggcgcatccttttggtaaggggcttcctcgctttttaaattttctttctttctctacagtcttttttggagtttcgtatatttcttatattttcttattgttcaatcactctcagttttcatctgatgaaaactttatttctcctccacatcagctttttcttctgctgtttcaccattcagagccctctgctaaggttccttttccctcccttttctttcttttgttgtttcacatctttaaatttctgtctctccccagggttgcgtttccttcctggtcagaattcttttctcctttttttttttttttttttttttttttaaacaaacaaacaaaaaacccaaaaaaactctttcccaatttactttcttccaacatgttacaaagccatccactcagtttagaagactctccggccccaccgacccccaacctcgttttgaagccattcactcaatttgcttctctctttctctacagcccctgtatgaggttgatgacttacgagacgcatttcgtactttgggactttgatagcaacttccaggaatgtcacacacgatgaaatatctctgctgaagacagtggataaaaaacagtccttcaagtcttctctgtttttattcttcaactctcactttcttagagtttacagaaaaaatatttatatacgactctttaaaaagatctatgtcttgaaaatagagaaggaacacaggtctggccagggacgtgctgcaattggtgcagttttgaatgcaacattgtcccctactgggaataacagaactgcaggacctgggagcatcctaaagtgtcaacgtttttctatgacttttaggtaggatgagagcagaaggtagatcctaaaaagcatggtgagaggatcaaatgtttttatatcaacatcctttattatttgattcatttgagttaacagtggtgttagtgatagatttttctattcttttcccttgacgtttactttcaagtaacacaaactcttccatcaggccatgatctataggacctcctaatgagagtatctgggtgattgtgaccccaaaccatctctccaaagcattaatatccaatcatgcgctgtatgttttaatcagcagaagcatgtttttatgtttgtacaaaagaagattgttatgggtggggatggaggtatagaccatgcatggtcaccttcaagctactttaataaaggatcttaaaatgggcaggaggactgtgaacaagacaccctaataatgggttgatgtctgaagtagcaaatcttctggaaacgcaaactcttttaaggaagtccctaatttagaaacacccacaaacttcacatatcataattagcaaacaattggaaggaagttgcttgaatgttggggagaggaaaatctattggctctcgtgggtctcttcatctcagaaatgccaatcaggtcaaggtttgctacattttgtatgtgtgtgatgcttctcccaaaggtatattaactatataagagagttgtgacaaaacagaatgataaagctgcgaaccgtggcacacgctcatagttctagctgcttgggaggttgaggagggaggatggcttgaacacaggtgttcaaggccagcctgggcaacataacaagatcctgtctctcaaaaaaaaaaaaaaaaaaaagaaagagagagggccgggcgtggtggctcacgcctgtaatcccagcactttgggaggccgagccgggcggatcacctgtggtcaggagtttgagaccagcctggccaacatggcaaaaccccgtctgtactcaaaatgcaaaaattagccaggcgtggtagcaggcacctgtaatcccagctacttgggaggctgaggcaggagaatcgcttgaacccaggaggtggaggttgcagtaagctgagatcgtgccgttgcactccagcctgggcgacaagagcaagactctgtctcagaaaaaaaaaaaaaaaagagagagagagagaaagagaacaatatttgggagagaaggatggggaagcattgcaaggaaattgtgctttatccaacaaaatgtaaggagccaataagggatccctatttgtctcttttggtgtctatttgtccctaacaactgtctttgacagtgagaaaaatattcagaataaccatatccctgtgccgttattacctagcaacccttgcaatgaagatgagcagatccacaggaaaacttgaatgcacaactgtcttattttaatcttattgtacataagtttgtaaaagagttaaaaattgttacttcatgtattcatttatattttatattattttgcgtctaatgattttttattaacatgatttccttttctgatatattgaaatggagtctcaaagcttcataaatttataactttagaaatgattctaataacaacgtatgtaattgtaacattgcagtaatggtgctacgaagccatttctcttgatttttagtaaacttttatgacagcaaatttgcttctggctcactttcaatcagttaaataaatgataaataattttggaagctgtgaagataaaataccaaataaaataatataaaagtgatttatatgaagttaaaataaaaaatcagtatgatggaataaacttg

SEQ ID NO: 16 - protein, 198 aa, Homo sapiens [sequence omitted]

SEQ ID NO: 17 - protein, 198 aa, Canis lupus
  REGION 1..198: note = MISC_FEATURE - Canine AID (clAID) polypeptide sequence
  REGION 1..30: note = MISC_FEATURE - Nuclear localization sequence
  REGION 183..198: note = MISC_FEATURE - Nuclear export signal
MDSLLMKQRKFLYHFKNVRWAKGRHETYLCYVVKRRDSATSFSLDFGHLRNKSGCHVELLFLRYISDWDLDPGRCYRVTWFTSWSPCYDCARHVADFLRGYPNLSLRIFAARLYFCEDRKAEPEGLRRLHRAGVQIAIMTFKDYFYCWNTFVENREKTFKAWEGLHENSVRLSRQLRRILLPLYEVDDLRDAFRTLGL

SEQ ID NO: 18 - protein, 199 aa, Bos taurus
  REGION 1..199: note = MISC_FEATURE - Bovine AID (btAID) polypeptide sequence
  REGION 1..30: note = MISC_FEATURE - Nuclear localization sequence
  REGION 183..199: note = MISC_FEATURE - Nuclear export signal
MDSLLKKQRQFLYQFKNVRWAKGRHETYLCYVVKRRDSPTSFSLDFGHLRNKAGCHVELLFLRYISDWDLDPGRCYRVTWFTSWSPCYDCARHVADFLRGYPNLSLRIFTARLYFCDKERKAEPEGLRRLHRAGVQIAIMTFKDYFYCWNTFVENHERTFKAWEGLHENSVRLSRQLRRILLPLYEVDDLRDAFRTLGL

SEQ ID NO: 19 - protein, 239 aa, Rattus sp.
  REGION 1..239: note = MISC_FEATURE - Rat AID polypeptide sequence
  REGION 1..26: note = MISC_FEATURE - Nuclear localization sequence
  REGION 194..239: note = MISC_FEATURE - Nuclear export signal
MAVGSKPKAALVGPHWERERIWCFLCSTGLGTQQTGQTSRWLRPAATQDPVSPPRSLLMKQRKFLYHFKNVRWAKGRHETYLCYVVKRRDSATSFSLDFGYLRNKSGCHVELLFLRYISDWDLDPGRCYRVTWFTSWSPCYDCARHVADFLRGNPNLSLRIFTARLTGWGALPAGLMSPARPSDYFYCWNTFVENHERTFKAWEGLHENSVRLSRRLRRILLPLYEVDDLRDAFRTLGL

SEQ ID NO: 20 - protein, 198 aa, Mus musculus [sequence omitted]

SEQ ID NO: 21 - protein, 229 aa, Rattus norvegicus [sequence omitted]

SEQ ID NO: 22 - protein, 229 aa, Mesocricetus auratus
  REGION 1..229: note = MISC_FEATURE - maAPOBEC-1 polypeptide sequence
MSSETGPVVVDPTLRRRIEPHEFDAFFDQGELRKETCLLYEIRWGGRHNIWRHTGQNTSRHVEINFIEKFTSERYFYPSTRCSIVWFLSWSPCGECSKAITEFLSGHPNVTLFIYAARLYHHTDQRNRQGLRDLISRGVTIRIMTEQEYCYCWRNFVNYPPSNEVYWPRYPNLWMRLYALELYCIHLGLPPCLKIKRRHQYPLTFFRLNLQSCHYQRIPPHILWATGFI

SEQ ID NO: 23 - protein, 236 aa, Pongo pygmaeus
  REGION 1..236: note = MISC_FEATURE - ppAPOBEC-1 polypeptide sequence
MTSEKGPSTGDPTLRRRIESWEFDVFYDPRELRKETCLLYEIKWGMSRKIWRSSGKNTTNHVEVNFIKKFTSERRFHSSISCSITWFLSWSPCWECSQAIREFLSQHPGVTLVIYVARLFWHMDQRNRQGLRDLVNSGVTIQIMRASEYYHCWRNFVNYPPGDEAHWPQYPPLWMMLYALELHCIILSLPPCLKISRRWQNHLAFFRLHLQNCHYQTIPPHILLATGLIHPSVTWR

SEQ ID NO: 24 - protein, 236 aa, Oryctolagus cuniculus
  REGION 1..236: note = MISC_FEATURE - ocAPOBEC1 polypeptide sequence
MASEKGPSNKDYTLRRRIEPWEFEVFFDPQELRKEACLLYEIKWGASSKTWRSSGKNTTNHVEVNFLEKLTSEGRLGPSTCCSITWFLSWSPCWECSMAIREFLSQHPGVTLIIFVARLFQHMDRRNRQGLKDLVTSGVTVRVMSVSEYCYCWENFVNYPPGKAAQWPRYPPRWMLMYALELYCIILGLPPCLKISRRHQKQLTFFSLTPQYCHYKMIPPYILLATGLLQPSVPWR

SEQ ID NO: 25 - protein, 235 aa, Monodelphis domestica
  REGION 1..235: note = MISC_FEATURE - mdAPOBEC-1 polypeptide sequence
MNSKTGPSVGDATLRRRIKPWEFVAFFNPQELRKETCLLYEIKWGNQNIWRHSNQNTSQHAEINFMEKFTAERHFNSSVRCSITWFLSWSPCWECSKAIRKFLDHYPNVTLAIFISRLYWHMDQQHRQGLKELVHSGVTIQIMSYSEYHYCWRNFVDYPQGEEDYWPKYPYLWIMLYVLELHCIILGLPPCLKISGSHSNQLALFSLDLQDCHYQKIPYNVLVATGLVQPFVTWR

SEQ ID NO: 26 - protein, 224 aa, Pongo pygmaeus
  REGION 1..224: note = MISC_FEATURE - ppAPOBEC-2 polypeptide sequence
MAQKEEAAAATEAASQNGEDLENLDDPEKLKELIELPPFEIVTGERLPANFFKFQFRNVEYSSGRNKTFLCYVVEAQGKGGQVQASRGYLEDEHAAAHAEEAFFNTILPAFDPALRYNVTWYVSSSPCAACADRIIKTLSKTKNLRLLILVGRLFMWEELEIQDALKKLKEAGCKLRIMKPQDFEYVWQNFVEQEEGESKAFQPWEDIQENFLYYEEKLADILK

SEQ ID NO: 27 - protein, 224 aa, Bos taurus
  REGION 1..224: note = MISC_FEATURE - btAPOBEC-2 polypeptide sequence
MAQKEEAAAAAEPASQNGEEVENLEDPEKLKELIELPPFEIVTGERLPAHYFKFQFRNVEYSSGRNKTFLCYVVEAQSKGGQVQASRGYLEDEHATNHAEEAFFNSIMPTFDPALRYMVTWYVSSSPCAACADRIVKTLNKTKNLRLLILVGRLFMWEEPEIQAALRKLKEAGCRLRIMKPQDFEYIWQNFVEQEEGESKAFEPWEDIQENFLYYEEKLADILK

SEQ ID NO: 28 - protein, 440 aa, Mus musculus
  REGION 1..440: note = MISC_FEATURE - mAPOBEC-3-(1) polypeptide sequence
MQPQRLGPRAGMGPFCLGCSHRKCYSPIRNLISQETFKFHFKNLGYAKGRKDTFLCYEVTRKDCDSPVSLHHGVFKNKDNIHAEICFLYWFHDKVLKVLSPREEFKITWYMSWSPCFECAEQIVRFLATHHNLSLDIFSSRLYNVQDPETQQNLCRLVQEGAQVAAMDLYEFKKCWKKFVDNGGRRFRPWKRLLTNFRYQDSKLQEILRPCYISVPSSSSSTLSNICLTKGLPETRFWVEGRRMDPLSEEEFYSQFYNQRVKHLCYYHRMKPYLCYQLEQFNGQAPLKGCLLSEKGKQHAEILFLDKIRSMELSQVTITCYLTWSPCPNCAWQLAAFKRDRPDLILHIYTSRLYFHWKRPFQKGLCSLWQSGILVDVMDLPQFTDCWTNFVNPKRPFWPWKGLEIISRRTQRRLRRIKESWGLQDLVNDFGNLQLGPPMS

SEQ ID NO: 29 - protein, 429 aa, Mus musculus
  REGION 1..429: note = MISC_FEATURE - APOBEC-3-(2) (Mouse APOBEC-3) polypeptide sequence
  REGION 71..108: note = MISC_FEATURE - Nucleic acid editing domain
  REGION 288..319: note = MISC_FEATURE - Nucleic acid editing domain
MGPFCLGCSHRKCYSPIRNLISQETFKFHFKNLGYAKGRKDTFLCYEVTRKDCDSPVSLHHGVFKNKDNIHAEICFLYWFHDKVLKVLSPREEFKITWYMSWSPCFECAEQIVRFLATHHNLSLDIFSSRLYNVQDPETQQNLCRLVQEGAQVAAMDLYEFKKCWKKFVDNGGRRFRPWKRLLTNFRYQDSKLQEILRPCYIPVPSSSSSTLSNICLTKGLPETRFCVEGRRMDPLSEEEFYSQFYNQRVKHLCYYHRMKPYLCYQLEQFNGQAPLKGCLLSEKGKQHAEILFLDKIRSMELSQVTITCYLTWSPCPNCAWQLAAFKRDRPDLILHIYTSRLYFHWKRPFQKGLCSLWQSGILVDVMDLPQFTDCWTNFVNPKRPFWPWKGLEIISRRTQRRLRRIKESWGLQDLVNDFGNLQLGPPMS

SEQ ID NO: 30 - protein, 430 aa, Rattus sp.
  REGION 1..430: note = MISC_FEATURE - APOBEC-3 polypeptide sequence
  REGION 72..109: note = MISC_FEATURE - Nucleic acid editing domain
  REGION 289..320: note = MISC_FEATURE - Nucleic acid editing domain
MGPFCLGCSHRKCYSPIRNLISQETFKFHFKNRLRYAIDRKDTFLCYEVTRKDCDSPVSLHHGVFKNKDNIHAEICFLYWFHDKVLKVLSPREEFKITWYMSWSPCFECAEQVLRFLATHHNLSLDIFSSRLYNIRDPENQQNLCRLVQEGAQVAAMDLYEFKKCWKKFVDNGGRRFRPWKKLLTNFRYQDSKLQEILRPCYIPVPSSSSSTLSNICLTKGLPETRFCVERRRVHLLSEEEFYSQFYNQRVKHLCYYHGVKPYLCYQLEQFNGQAPLKGCLLSEKGKQHAEILFLDKIRSMELSQVIITCYLTWSPCPNCAWQLAAFKRDRPDLILHIYTSRLYFHWKRPFQKGLCSLWQSGILVDVMDLPQFTDCWTNFVNPKRPFWPWKGLEIISRRTQRRLHRIKESWGLQDLVNDFGNLQLGPPMS

SEQ ID NO: 31 - protein, 199 aa, Homo sapiens
  REGION 1..199: note = MISC_FEATURE - hAPOBEC-3A polypeptide sequence
  REGION 70..106: note = MISC_FEATURE - Nucleic acid editing domain
MEASPASGPRHLMDPHIFTSNFNNGIGRHKTYLCYEVERLDNGTSVKMDQHRGFLHNQAKNLLCGFYGRHAELRFLDLVPSLQLDPAQIYRVTWFISWSPCFSWGCAGEVRAFLQENTHVRLRIFAARIYDYDPLYKEALQMLRDAGAQVSIMTYDEFKHCWDTFVDHQGCPFQPWDGLDEHSQALSGRLRAILQNQGN

SEQ ID NO: 32 - protein, 373 aa, Homo sapiens
  REGION 1..373: note = MISC_FEATURE - hAPOBEC-3F polypeptide sequence
  REGION 65..99: note = MISC_FEATURE - Nucleic acid editing domain
  REGION 248..283: note = MISC_FEATURE - Nucleic acid editing domain
MKPHFRNTVERMYRDTFSYNFYNRPILSRRNTVWLCYEVKTKGPSRPRLDAKIFRGQVYSQPEHHAEMCFLSWFCGNQLPAYKCFQITWFVSWTPCPDCVAKLAEFLAEHPNVTLTISAARLYYYWERDYRRALCRLSQAGARVKIMDDEEFAYCWENFVYSEGQPFMPWYKFDDNYAFLHRTLKEILRNPMEAMYPHIFYFHFKNLRKAYGRNESWLCFTMEVVKHHSPVSWKRGVFRNQVDPETHCHAERCFLSWFCDDILSPNTNYEVTWYTSWSPCPECAGEVAEFLARHSNVNLTIFTARLYYFWDTDYQEGLRSLSQEGASVEIMGYKDFKYCWENFVYNDDEPFKPWKGLKYNFLFLDSKLQEILE

SEQ ID NO: 33 - protein, 370 aa, Rhesus macaque
  REGION 1..370: note = MISC_FEATURE - Rhesus macaque APOBEC-3G polypeptide sequence
  REGION 1..61: note = MISC_FEATURE - Cytoplasmic localization signal
MVEPMDPRTFVSNFNNRPILSGLNTVWLCCEVKTKDPSGPPLDAKIFQGKVYSKAKYHPEMRFLRWFHKWRQLHHDQEYKVTWYVSWSPCTRCANSVATFLAKDPKVTLTIFVARLYYFWKPDYQQALRILCQKRGGPHATMKIMNYNEFQDCWNKFVDGRGKPFKPRNNLPKHYTLLQATLGELLRHLMDPGTFTSNFNNKPWVSGQHETYLCYKVERLHNDTWVPLNQHRGFLRNQAPNIHGFPKGRHAELCFLDLIPFWKLDGQQYRVTCFTSWSPCFSCAQEMAKFISNNEHVSLCIFAARIYDDQGRYQEGLRALHRDGAKIAMMNYSEFEYCWDTFVDRQGRPFQPWDGLDEHSQALSGRLRAI

SEQ ID NO: 34 - protein, 384 aa, Pan troglodytes
  REGION 1..384: note = MISC_FEATURE - Chimpanzee APOBEC-3G polypeptide sequence
  REGION 1..60: note = MISC_FEATURE - Cytoplasmic localization signal
  REGION 65..100: note = MISC_FEATURE - Nucleic acid editing domain
  REGION 257..291: note = MISC_FEATURE - Nucleic acid editing domain
MKPHFRNPVERMYQDTFSDNFYNRPILSHRNTVWLCYEVKTKGPSRPPLDAKIFRGQVYSKLKYHPEMRFFHWFSKWRKLHRDQEYEVTWYISWSPCTKCTRDVATFLAEDPKVTLTIFVARLYYFWDPDYQEALRSLCQKRDGPRATMKIMNYDEFQHCWSKFVYSQRELFEPWNNLPKYYILLHIMLGEILRHSMDPPTFTSNFNNELWVRGRHETYLCYEVERLHNDTWVLLNQRRGFLCNQAPHKHGFLEGRHAELCFLDVIPFWKLDLHQDYRVTCFTSWSPCFSCAQEMAKFISNNKHVSLCIFAARIYDDQGRCQEGLRTLAKAGAKISIMTYSEFKHCWDTFVDHQGCPFQPWDGLEEHSQALSGRLRAILQNQGN

SEQ ID NO: 35 - protein, 377 aa, Chlorocebus sabaeus
  REGION 1..377: note = MISC_FEATURE - Green monkey APOBEC-3G polypeptide sequence
  REGION 1..60: note = MISC_FEATURE - Cytoplasmic localization signal
  REGION 65..100: note = MISC_FEATURE - Nucleic acid editing domain
  REGION 257..290: note = MISC_FEATURE - Nucleic acid editing domain
MNPQIRNMVEQMEPDIFVYYFNNRPILSGRNTVWLCYEVKTKDPSGPPLDANIFQGKLYPEAKDHPEMKFLHWFRKWRQLHRDQEYEVTWYVSWSPCTRCANSVATFLAEDPKVTLTIFVARLYYFWKPDYQQALRILCQERGGPHATMKIMNYNEFQHCWNEFVDGQGKPFKPRKNLPKHYTLLHATLGELLRHVMDPGTFTSNFNNKPWVSGQRETYLCYKVERSHNDTWVLLNQHRGFLRNQAPDRHGFPKGRHAELCFLDLIPFWKLDDQQYRVTCFTSWSPCFSCAQKMAKFISNNKHVSLCIFAARIYDDQGRCQEGLRTLHRDGAKIAVMNYSEFEYCWDTFVDRQGRPFQPWDGLDEHSQALSGRLRAI

SEQ ID NO: 36 - protein, 384 aa, Homo sapiens
  REGION 1..384: note = MISC_FEATURE - Human APOBEC-3G polypeptide sequence
  REGION 1..60: note = MISC_FEATURE - Cytoplasmic localization signal
  REGION 65..100: note = MISC_FEATURE - Nucleic acid editing domain
  REGION 257..291: note = MISC_FEATURE - Nucleic acid editing domain
MKPHFRNTVERMYRDTFSYNFYNRPILSRRNTVWLCYEVKTKGPSRPPLDAKIFRGQVYSELKYHPEMRFFHWFSKWRKLHRDQEYEVTWYISWSPCTKCTRDMATFLAEDPKVTLTIFVARLYYFWDPDYQEALRSLCQKRDGPRATMKIMNYDEFQHCWSKFVYSQRELFEPWNNLPKYYILLHIMLGEILRHSMDPPTFTFNFNNEPWVRGRHETYLCYEVERMHNDTWVLLNQRRGFLCNQAPHKHGFLEGRHAELCFLDVIPFWKLDLDQDYRVTCFTSWSPCFSCAQEMAKFISKNKHVSLCIFTARIYDDQGRCQEGLRTLAEAGAKISIMTYSEFKHCWDTFVDHQGCPFQPWDGLDEHSQDLSGRLRAILQNQEN

SEQ ID NO: 37 - protein, 382 aa, Homo sapiens
  REGION 1..382: note = MISC_FEATURE - Human APOBEC-3B polypeptide sequence
  REGION 66..100: note = MISC_FEATURE - Nucleic acid editing domain
  REGION 251..289: note = MISC_FEATURE - Nucleic acid editing domain
MNPQIRNPMERMYRDTFYDNFENEPILYGRSYTWLCYEVKIKRGRSNLLWDTGVFRGQVYFKPQYHAEMCFLSWFCGNQLPAYKCFQITWFVSWTPCPDCVAKLAEFLSEHPNVTLTISAARLYYYWERDYRRALCRLSQAGARVTIMDYEEFAYCWENFVYNEGQQFMPWYKFDENYAFLHRTLKEILRYLMDPDTFTFNFNNDPLVLRRRQTYLCYEVERLDNGTWVLMDQHMGFLCNEAKNLLCGFYGRHAELRFLDLVPSLQLDPAQIYRVTWFISWSPCFSWGCAGEVRAFLQENTHVRLRIFAARIYDYDPLYKEALQMLRDAGAQVSIMTYDEFEYCWDTFVYRQGCPFQPWDGLEEHSQALSGRLRAILQNQGN

SEQ ID NO: 38 - protein, 395 aa, Rattus sp.
  REGION 1..395: note = MISC_FEATURE - Rat APOBEC-3B polypeptide sequence
MQPQGLGPNAGMGPVCLGCSHRRPYSPIRNPLKKLYQQTFYFHFKNVRYAWGRKNNFLCYEVNGMDCALPVPLRQGVFRKQGHIHAELCFIYWFHDKVLRVLSPMEEFKVTWYMSWSPCSKCAEQVARFLAAHRNLSLAIFSSRLYYYLRNPNYQQKLCRLIQEGVHVAAMDLPEFKKCWNKFVDNDGQPFRPWMRLRINFSFYDCKLQEIFSRMNLLREDVFYLQFNNSHRVKPVQNRYYRRKSYLCYQLERANGQEPLKGYLLYKKGEQHVEILFLEKMRSMELSQVRITCYLTWSPCPNCARQLAAFKKDHPDLILRIYTSRLYFWRKKFQKGLCTLWRSGIHVDVMDLPQFADCWTNFVNPQRPFRPWNELEKNSWRIQRRLRRIKESWGL

SEQ ID NO: 39 - protein, 226 aa, Bos taurus
  REGION 1..226: note = MISC_FEATURE - Bovine APOBEC-3B polypeptide sequence
DGWEVAFRSGTVLKAGVLGVSMTEGWAGSGHPGQGACVWTPGTRNTMNLLREVLFKQQFGNQPRVPAPYYRRKTYLCYQLKQRNDLTLDRGCFRNKKQRHAERFIDKINSLDLNPSQSYKIICYITWSPCPNCANELVNFITRNNHLKLEIFASRLYFHWIKSFKMGLQDLQNAGISVAVMTHTEFEDCWEQFVDNQSRPFQPWDKLEQYSASIRRRLQRILTAPI

SEQ ID NO: 40 - protein, 490 aa, Pan troglodytes
  REGION 1..490: note = MISC_FEATURE - Chimpanzee APOBEC-3B polypeptide sequence
MNPQIRNPMEWMYQRTFYYNFENEPILYGRSYTWLCYEVKIRRGHSNLLWDTGVFRGQMYSQPEHHAEMCFLSWFCGNQLSAYKCFQITWFVSWTPCPDCVAKLAKFLAEHPNVTLTISAARLYYYWERDYRRALCRLSQAGARVKIMDDEEFAYCWENFVYNEGQPFMPWYKFDDNYAFLHRTLKEIIRHLMDPDTFTFNFNNDPLVLRRHQTYLCYEVERLDNGTWVLMDQHMGFLCNEAKNLLCGFYGRHAELRFLDLVPSLQLDPAQIYRVTWFISWSPCFSWGCAGQVRAFLQENTHVRLRIFAARIYDYDPLYKEALQMLRDAGAQVSIMTYDEFEYCWDTFVYRQGCPFQPWDGLEEHSQALSGRLRAILQVRASSLCMVPHRPPPPPQSPGPCLPLCSEPPLGSLLPTGRPAPSLPFLLTASFSFPPPASLPPLPSLSLSPGHLPVPSFHSLTSCSIQPPCSSRIRETEGWASVSKEGRDLG

SEQ ID NO: 41 - protein, 190 aa, Homo sapiens
  REGION 1..190: note = MISC_FEATURE - Human APOBEC-3C polypeptide sequence
  REGION 65..100: note = MISC_FEATURE - Nucleic acid editing domain
MNPQIRNPMKAMYPGTFYFQFKNLWEANDRNETWLCFTVEGIKRRSVVSWKTGVFRNQVDSETHCHAERCFLSWFCDDILSPNTKYQVTWYTSWSPCPDCAGEVAEFLARHSNVNLTIFTARLYYFQYPCYQEGLRSLSQEGVAVEIMDYEDFKYCWENFVYNDNEPFKPWKGLKTNFRLLKRRLRESLQ

SEQ ID NO: 42 - protein, 190 aa, Gorilla sp.
  REGION 1..190: note = MISC_FEATURE - Gorilla APOBEC-3C polypeptide sequence
  REGION 65..100: note = MISC_FEATURE - Nucleic acid editing domain
MNPQIRNPMKAMYPGTFYFQFKNLWEANDRNETWLCFTVEGIKRRSVVSWKTGVFRNQVDSETHCHAERCFLSWECDDILSPNTNYQVTWYTSWSPCPECAGEVAEFLARHSNVNLTIFTARLYYFQDTDYQEGLRSLSQEGVAVKIMDYKDFKYCWENFVYNDDEPFKPWKGLKYNFRFLKRRLQEILE

SEQ ID NO: 43 - protein, 202 aa, Rhesus macaque
  REGION 1..202: note = MISC_FEATURE - Rhesus macaque APOBEC-3A polypeptide sequence
  REGION 72..103: note = MISC_FEATURE - Nucleic acid editing domain
MDGSPASRPRHLMDPNTFTFNFNNDLSVRGRHQTYLCYEVERLDNGTWVPMDERRGFLCNKAKNVPCGDYGCHVELRFLCEVPSWQLDPAQTYRVTWFISWSPCFRRGCAGQVRVFLQENKHVRLRIFAARIYDYDPLYQEALRTLRDAGAQVSIMTYEEFKHCWDTFVDRQGRPFQPWDGLDEHSQALSGRLRAILQNQGN

SEQ ID NO: 44 - protein, 185 aa, Bos taurus
  REGION 1..185: note = MISC_FEATURE - Bovine APOBEC-3A polypeptide sequence
  REGION 56..86: note = MISC_FEATURE - Nucleic acid editing domain
MDEYTFTENFNNQGWPSKTYLCYEMERLDGDATIPLDEYKGFVRNKGLDQPEKPCHAELYFLGKIHSWNLDRNQHYRLTCFISWSPCYDCAQKLTTFLKENHHISLHILASRIYTHNRFGCHQSGLCELQAAGARITIMTFEDFKHCWETFVDHKGKPFQPWEGLNVKSQALCTELQAILKTQQN

SEQ ID NO: 45 - protein, 200 aa, Homo sapiens
  REGION 1..200: note = MISC_FEATURE - Human APOBEC-3H polypeptide sequence
  REGION 54..88: note = MISC_FEATURE - Nucleic acid editing domain
MALLTAETFRLQFNNKRRLRRPYYPRKALLCYQLTPQNGSTPTRGYFENKKKCHAEICFINEIKSMGLDETQCYQVTCYLTWSPCSSCAWELVDFIKAHDHLNLGIFASRLYYHWCKPQQKGLRLLCGSQVPVEVMGFPKFADCWENFVDHEKPLSFNPYKMLEELDKNSRAIKRRLERIKIPGVRAQGRYMDILCDAEV

SEQ ID NO: 46 - protein, 210 aa, Rhesus macaque
  REGION 1..210: note = MISC_FEATURE - Rhesus macaque APOBEC-3H polypeptide sequence
MALLTAKTFSLQFNNKRRVNKPYYPRKALLCYQLTPQNGSTPTRGHLKNKKKDHAEIRFINKIKSMGLDETQCYQVTCYLTWSPCPSCAGELVDFIKAHRHLNLRIFASRLYYHWRPNYQEGLLLLCGSQVPVEVMGLPEFTDCWENFVDHKEPPSFNPSEKLEELDKNSQAIKRRLERIKSRSVDVLENGLRSLQLGPVTPSSSIRNSR

SEQ ID NO: 47 - protein, 386 aa, Homo sapiens
  REGION 1..386: note = MISC_FEATURE - Human APOBEC-3D polypeptide sequence
  REGION 78..109: note = MISC_FEATURE - Nucleic acid editing domain
  REGION 262..296: note = MISC_FEATURE - Nucleic acid editing domain
MNPQIRNPMERMYRDTFYDNFENEPILYGRSYTWLCYEVKIKRGRSNLLWDTGVFRGPVLPKRQSNHRQEVYFRFENHAEMCFLSWFCGNRLPANRRFQITWFVSWNPCLPCVVKVTKFLAEHPNVTLTISAARLYYYRDRDWRWVLLRLHKAGARVKIMDYEDFAYCWENFVCNEGQPFMPWYKFDDNYASLHRTLKEILRNPMEAMYPHIFYFHFKNLLKACGRNESWLCFTMEVTKHHSAVFRKRGVFRNQVDPETHCHAERCFLSWFCDDILSPNTNYEVTWYTSWSPCPECAGEVAEFLARHSNVNLTIFTARLCYFWDTDYQEGLCSLSQEGASVKIMGYKDFVSCWKNFVYSDDEPFKPWKGLQTNFRLLKRRLREILQ

SEQ ID NO: 48 - protein, 236 aa, Homo sapiens
  REGION 1..236: note = MISC_FEATURE - Human APOBEC-1 polypeptide sequence
MTSEKGPSTGDPTLRRRIEPWEFDVFYDPRELRKEACLLYEIKWGMSRKIWRSSGKNTTNHVEVNFIKKFTSERDFHPSMSCSITWFLSWSPCWECSQAIREFLSRHPGVTLVIYVARLFWHMDQQNRQGLRDLVNSGVTIQIMRASEYYHCWRNFVNYPPGDEAHWPQYPPLWMMLYALELHCIILSLPPCLKISRRWQNHLTFFRLHLQNCHYQTIPPHILLATGLIHPSVAWR

SEQ ID NO: 49 - protein, 229 aa, Mus musculus
  REGION 1..229: note = MISC_FEATURE - Mouse APOBEC-1 polypeptide sequence
MSSETGPVAVDPTLRRRIEPHEFEVFFDPRELRKETCLLYEINWGGRHSVWRHTSQNTSNHVEVNFLEKFTTERYFRPNTRCSITWFLSWSPCGECSRAITEFLSRHPYVTLFIYIARLYHHTDQRNRQGLRDLISSGVTIQIMTEQEYCYCWRNFVNYPPSNEAYWPRYPHLWVKLYVLELYCIILGLPPCLKILRRKQPQLTFFTITLQTCHYQRIPPHLLWATGLK

SEQ ID NO: 50 - protein, 224 aa, Homo sapiens
  REGION 1..224: note = MISC_FEATURE - Human APOBEC-2 polypeptide sequence
MAQKEEAAVATEAASQNGEDLENLDDPEKLKELIELPPFEIVTGERLPANFFKFQFRNVEYSSGRNKTFLCYVVEAQGKGGQVQASRGYLEDEHAAAHAEEAFFNTILPAFDPALRYNVTWYVSSSPCAACADRIIKTLSKTKNLRLLILVGRLFMWEEPEIQAALKKLKEAGCKLRIMKPQDFEYVWQNFVEQEEGESKAFQPWEDIQENFLYYEEKLADILK

SEQ ID NO: 51 - protein, 224 aa, Mus musculus
  REGION 1..224: note = MISC_FEATURE - Mouse APOBEC-2 polypeptide sequence
MAQKEEAAEAAAPASQNGDDLENLEDPEKLKELIDLPPFEIVTGVRLPVNFFKFQFRNVEYSSGRNKTFLCYVVEVQSKGGQAQATQGYLEDEHAGAHAEEAFFNTILPAFDPALKYNVTWYVSSSPCAACADRILKTLSKTKNLRLLILVSRLFMWEEPEVQAALKKLKEAGCKLRIMKPQDFEYIWQNFVEQEEGESKAFEPWEDIQENFLYYEEKLADILK

SEQ ID NO: 52 - protein, 224 aa, Rattus sp.
  REGION 1..224: note = MISC_FEATURE - Rat APOBEC-2 polypeptide sequence
MAQKEEAAEAAAPASQNGDDLENLEDPEKLKELIDLPPFEIVTGVRLPVNFFKFQFRNVEYSSGRNKTFLCYVVEAQSKGGQVQATQGYLEDEHAGAHAEEAFFNTILPAFDPALKYNVTWYVSSSPCAACADRILKTLSKTKNLRLLILVSRLFMWEEPEVQAALKKLKEAGCKLRIMKPQDFEYLWQNFVEQEEGESKAFEPWEDIQENFLYYEEKLADILK

SEQ ID NO: 53 - protein, 208 aa, Petromyzon marinus
  REGION 1..208: note = MISC_FEATURE - Petromyzon marinus CDA1 (pmCDAl) polypeptide sequence
MTDAEYVRIHEKLDIYTFKKQFFNNKKSVSHRCYVLFELKRRGERRACFWGYAVNKPQSGTERGIHAEIFSIRKVEEYLRDNPGQFTINWYSSWSPCADCAEKILEWYNQELRGNGHTLKIWACKLYYEKNARNQIGLWNLRDNGVGLNVMVSEHYQCCRKIFIQSSHNQLNENRWLEKTLKRAEKRRSELSFMIQVKILHTTKSPAV

SEQ ID NO: 54 - protein, 381 aa, Homo sapiens
  REGION 1..381: note = MISC_FEATURE - Human APOBEC3G D316R D317R polypeptide sequence
MKPHFRNTVERMYRDTFSYNFYNRPILSRRNTVWLCYEVKTKGPSRPPLDAKIFRGQVYSELKYHPEMRFFHWFSKWRKLHRDQEYEVTWYISWSPCTKCTRDMATFLAEDPKVTLTIFVARLYYFWDPDYQEALRSLCQKRDGPRATMKFNYDEFQHCWSKFVYSQRELFEPWNNLPKYYILLHFMLGEILRHSMDPPTFTFNFNNEPWVRGRHETYLCYEVERMHNDTWVLLNQRRGFLCNQAPHKHGFLEGRHAELCFLDVIPFWKLDLDQDYRVTCFTSWSPCFSCAQEMAKFISKKHVSLCIFTARIYRRQGRCQEGLRTLAEAGAKISFTYSEFKHCWDTFVDHQGCPFQPWDGLDEHSQDLSGRLRAILQNQEN

SEQ ID NO: 55 - protein, 182 aa, Homo sapiens
  REGION 1..182: note = MISC_FEATURE - Human APOBEC3G chain A polypeptide sequence
MDPPTFTFNFNNEPWWGRHETYLCYEVERMHNDTWVLLNQRRGFLCNQAPHKHGFLEGRHAELCFLDVIPFWKLDLDQDYRVTCFTSWSPCFSCAQEMAKFISKNKHVSLCIFTARIYDDQGRCQEGLRTLAEAGAKISFTYSEFKHCWDTFVDHQGCPFQPWDGLDEHSQDLSGRLRAILQ

SEQ ID NO: 56 - protein, 184 aa, Homo sapiens
  REGION 1..184: note = MISC_FEATURE - Human APOBEC3G chain A D120R D121R polypeptide sequence
MDPPTFTFNFNNEPWVRGRHETYLCYEVERMHNDTWVLLNQRRGFLCNQAPHKHGFLEGRHAELCFLDVIPFWKLDLDQDYRVTCFTSWSPCFSCAQEMAKFISKNKHVSLCIFTARIYRRQGRCQEGLRTLAEAGAKISFMTYSEFKHCWDTFVDHQGCPFQPWDGLDEHSQDLSGRLRAILQ

SEQ ID NO: 57 - protein, 367 aa, Homo sapiens
  REGION 1..367: note = MISC_FEATURE - hAPOBEC-4 polypeptide sequence
MEPIYEEYLANHGTIVKPYYWLSFSLDCSNCPYHIRTGEEARVSLTEFCQIFGFPYGTTFPQTKHLTFYELKTSSGSLVQKGHASSCTGNYIHPESMLFEMNGYLDSAIYNNDSIRHIILYSNNSPCNEANHCCISKMYNFLITYPGITLSIYFSQLYHTEMDFPASAWNREALRSLASLWPRVVLSPISGGIWHSVLHSFISGVSGSHVFQPILTGRALADRHNAYEINAITGVKPYFTDVLLQTKRNPNTKAQEALESYPLNNAFPGQFFQMPSGQLQPNLPPDLRAPVVFVLVPLRDLPPMHMGQNPNKPRNIVRHLNMPQMSFQETKDLGRLPTGRSVEIVEITEQFASSKEADEKKKKKGKK

SEQ ID NO: 58 - protein, 388 aa, Rattus norvegicus
  REGION 1..388: note = MISC_FEATURE - rAPOBEC-4 polypeptide sequence
MEPLYEEYLTHSGTIVKPYYWLSVSLNCTNCPYHIRTGEEARVPYTEFHQTFGFPWSTYPQTKHLTFYELRSSSGNLIQKGLASNCTGSHTHPESMLFERDGYLDSLIFHDSNIRHIILYSNNSPCDEANHCCISKMYNFLMNYPEVTLSVFFSQLYHTENQFPTSAWNREALRGLASLWPQVTLSAISGGIWQSILETFVSGISEGLTAVRPFTAGRTLTDRYNAYEINCITEVKPYFTDALHSWQKENQDQKVWAASENQPLHNTTPAQWQPDMSQDCRTPAVFMLVPYRDLPPIHVNPSPQKPRTVVRHLNTLQLSASKVKALRKSPSGRPVKKEEARKGSTRSQEANETNKSKWKKQTLFIKSNICHLLEREQKKIGILSSWSV

SEQ ID NO: 59 - protein, 363 aa, Macaca fascicularis
  REGION 1..363: note = MISC_FEATURE - mfAPOBEC-4 polypeptide sequence
MEPTYEEYLANHGTIVKPYYWLSFSLDCSNCPYHIRTGEEARVSLTEFCQIFGFPYGTTYPQTKHLTFYELKTSSGSLVQKGHASSCTGNYIHPESMLFEMNGYLDSAIYNNDSIRHIILYCNNSPCNEANHCCISKVYNFLITYPGITLSIYFSQLYHTEMDFPASAWNREALRSLASLWPRVVLSPISGGIWHSVLHSFVSGVSGSHVFQPILTGRALTDRYNAYEINAITGVKPFFTDVLLHTKRNPNTKAQMALESYPLNNAFPGQSFQMTSGIPPDLRAPVVFVLLPLRDLPPMHMGQDPNKPRNIIRHLNMPQMSFQETKDLERLPTRRSVETVEITERFASSKQAEEKTKKKKGKK

SEQ ID NO: 60 - protein, 218 aa, Rattus norvegicus
  REGION 1..218: note = MISC_FEATURE - rAPOBEC-1 (delta 177-186) polypeptide sequence
MSSETGPVAVDPTLRRRIEPHEFEVFFDPRELRKETCLLYEINWGGRHSIWRHTSQNTNKHVEVNFIEKFTTERYFCPNTRCSITWFLSWSPCGECSRAITEFLSRYPHVTLFIYIARLYHHADPRNRQGLRDLISSGVTIQIMTEQESGYCWRNFVNYSPSNEAHWPRYPHLWVRGLPPCLNILRRKQPQLTFFTIALQSCHYQRLPPHILWATGLK

SEQ ID NO: 61 - protein, 218 aa, Rattus norvegicus
  REGION 1..218: note = MISC_FEATURE - rAPOBEC-1 (delta 202-213) polypeptide sequence
MSSETGPVAVDPTLRRRIEPHEFEVFFDPRELRKETCLLYEINWGGRHSIWRHTSQNTNKHVEVNFIEKFTTERYFCPNTRCSITWFLSWSPCGECSRAITEFLSRYPHVTLFIYIARLYHHADPRNRQGLRDLISSGVTIQIMTEQESGYCWRNFVNYSPSNEAHWPRYPHLWVRLYVLELYCIILGLPPCLNILRRKQPQHYQRLPPHILWATGLK

SEQ ID NO: 62 - protein, 198 aa, Mus musculus
  REGION 1..198: note = MISC_FEATURE - mouse cytidine deaminase polypeptide sequence
  REGION 1..30: note = MISC_FEATURE - Nuclear localization sequence
  REGION 183..198: note = MISC_FEATURE - Nuclear export signal
MDSLLMKQKKFLYHFKNVRWAKGRHETYLCYVVKRRDSATSCSLDFGHLRNKSGCHVELLFLRYISDWDLDPGRCYRVTWFTSWSPCYDCARHVAEFLRWNPNLSLRIFTARLYFCEDRKAEPEGLRRLHRAGVQIGIMTFKDYFYCWNTFVENRERTFKAWEGLHENSVRLTRQLRRILLPLYEVDDLRDAFRMLGF

SEQ ID NO: 63 - protein, 224 aa, Petromyzon marinus
  REGION 1..224: note = MISC_FEATURE - pmCDA-1 polypeptide sequence
MAGYECVRVSEKLDFDTFEFQFENLHYATERHRTYVIFDVKPQSAGGRSRRLWGYIINNPNVCHAELILMSMIDRHLESNPGVYAMTWYMSWSPCANCSSKLNPWLKNLLEEQGHTLTMHFSRIYDRDREGDHRGLRGLKHVSNSFRMGVVGRAEVKECLAEYVEASRRTLTWLDTTESMAAKMRRKLFCILVRCAGMRESGIPLHLFTLQTPLLSGRVVWWRV

SEQ ID NO: 64 - protein, 331 aa, Petromyzon marinus
  REGION 1..331: note = MISC_FEATURE - pmCDA-2 polypeptide sequence
MELREVVDCALASCVRHEPLSRVAFLRCFAAPSQKPRGTVILFYVEGAGRGVTGGHAVNYNKQGTSIHAEVLLLSAVRAALLRRRRCEDGEEATRGCTLHCYSTYSPCRDCVEYIQEFGASTGVRVVIHCCRLYELDVNRRRSEAEGVLRSLSRLGRDFRLMGPRDAIALLLGGRLANTADGESGASGNAWVTETNVVEPLVDMTGFGDEDLHAQVQRNKQIREAYANYASAVSLMLGELHVDPDKFPFLAEFLAQTSVEPSGTPRETRGRPRGASSRGPEIGRQRPADFERALGAYGLFLHPRIVSREADREEIKRDLIVVMRKHNYQGP

SEQ ID NO: 65 - protein, 209 aa, Petromyzon marinus
  REGION 1..209: note = MISC_FEATURE - pmCDA-5 polypeptide sequence
MAGDENVRVSEKLDFDTFEFQFENLHYATERHRTYVIFDVKPQSAGGRSRRLWGYIINNPNVCHAELILMSMIDRHLESNPGVYAMTWYMSWSPCANCSSKLNPWLKNLLEEQGHTLMMHFSRIYDRDREGDHRGLRGLKHVSNSFRMGVVGRAEVKECLAEYVEASRRTLTWLDTTESMAAKMRRKLFCILVRCAGMRESGMPLHLFT

SEQ ID NO: 66 - protein, 158 aa, Saccharomyces cerevisiae
  REGION 1..158: note = MISC_FEATURE - yCD polypeptide sequence
MVTGGMASKWDQKGMDIAYEEAALGYKEGGVPIGGCLINNKDGSVLGRGHNMRFQKGSATLHGEISTLENCGRLEGKVYKDTTLYTTLSPCDMCTGAIIMYGIPRCVVGENVNFKSKGEKYLQTRGHEVVVVDDERCKKIMKQFIDERPQDWFEDIGE

SEQ ID NO: 67 - protein, 194 aa, synthetic construct
  REGION 1..194: note = cytidine deaminase polypeptide sequence
MKPQIRDHRPNPMEAMYPHIFYFHFENLEKAYGRNETWLCFTVEIIKQYLPVPWKKGVFRNQVDPETHCHAEKCFLSWFCNNTLSPKKNYQVTWYTSWSPCPECAGEVAEFLAEHSNVKLTIYTARLYYFWDTDYQEGLRSLSEEGASVEIMDYEDFQYCWENFVYDDGEPFKRWKGLKYNFQSLTRRLREILQ

SEQ ID NO: 68 - protein, 192 aa, synthetic construct
  REGION 1..192: note = cytidine deaminase polypeptide sequence
MADSSEKMRGQYISRDTFEKNYKPIDGTKEAHLLCEIKWGKYGKPWLHWCQNQRMNIHAEDYFMNNIFKAKKHPVHCYVTWYLSWSPCADCASKIVKFLEERPYLKLTIYVAQLYYHTEEENRKGLRLLRSKKVIIRVMDISDYNYCWKVFVSNQNGNEDYWPLQFDPWVKENYSRLLDIFWESKCRSPNPW

SEQ ID NO: 69 - protein, 280 aa, synthetic construct
  REGION 1..280: note = cytidine deaminase polypeptide sequence
MDPQRLRQWPGPGPASRGGYGQRPRIRNPEEWFHELSPRTFSFHFRNLRFASGRNRSYICCQVEGKNCFFQGIFQNQVPPDPPCHAELCFLSWFQSWGLSPDEHYYVTWFISWSPCCECAAKVAQFLEENRNVSLSLSAARLYYFWKSESREGLRRLSDLGAQVGIMSFQDFQHCWNNFVHNLGMPFQPWKKLHKNYQRLVTELKQILREEPATYGSPQAQGKVRIGSTAAGLRHSHSHTRSEAHLRPNHSSRQHRILNPPREARARTCVLVDASWICYR

SEQ ID NO: 70 - protein, 555 aa, synthetic construct
  REGION 1..555: note = pYY-BEM3.1; tr|F7B644|F7B644_HORSE polypeptide sequence
MPRGRARERQRRNPMEKLDAEAFSFHFLNMEFVYDRNCSYLCYQVEGRLSGSPVLSEQGVFPNEVCGKTRRHAELCFLDWFRGRLSPDEYYCVTWFISWSPCSNCAREVAEFLKRHRNVELSIFAARLYYCRDHEQGLQSLCNRGAQLAVMLRKDFTYCWDNFVHNSGREFSPWENIDANSDLLARKLEDLLKNPMEKLHRKTFSFHFRNLKFAKGRKCSYLCYRVEGRLSGSPGLSEQGVFLNEVCDENCRHAELCFLHWFRGRLSPHADYRVTWFISWSPCSNCAREVAEFLKQHRNVELHISAARLYYWQRNKPGLRNLRSSGAQLAIMFFWDFRDCWDNFVHNSGRHFIPWKKINVNSRLLATKLEDLLKNPLEKLHPNTFSFHFCNLEFAYDRKYSYLCYQVEGRLSGSPGLSEQGVFLNEVCGKTRCHAELCFLDWFRVRLSPDEYYRVTWFISWSPCFYCAREVADFLKQYRNVKLSIFAARLYYCRDHAQGLRSLCSSGAQLAIMFFWDFRYCWDNFVHNSGREFRPWKKINVNSRLLATKLEDILK

SEQ ID NO: 71 - protein, 437 aa, synthetic construct
  REGION 1..437: note = pYY-BEM3.2; tr|D1LZA1|D1LZA1_PANTI polypeptide sequence
MEPWRPSPRNPMDRIDPKTFRFQFPNLRYASGRKLCYLCFQVERDYFYYNDSDWGVFRNEVHPWAPCHAEQCFLSWFRDQYPYRDEDYNVTWFLSWSPCPTCAEEVVEFLEEYRNLTLSIFTSRLYYFWHPNYQEGLCKLWDAGVQLDIMSCDEFEYCWDNFVYHKGMRFQRRNLLKDYDFLAAKLQEILSPGQQRKRDWPFPPRPGAQVDPRSWVQEVTEPGINTRRHPLHLLVSFLLPRPTMNPLQEDIFYRQFGNQHRVPKPYYYRRKTYLCYQLKLPEGTLIDKDCLRNKKKRHAEICFIDKIKSLTRDTSQRFEIICYITWSPCPFCAEELVAFVKDNPHLSLRIFASRLYVHWRWKYQQGLRHLHASGIPVAVMSLPEFEDCWRNFVDHQDRLFQPWRNLDQYSESIKRRLGKILTPLNDLRNDFRNLKLE

SEQ ID NO: 72 - protein, 440 aa, synthetic construct
  REGION 1..440: note = pYY-BEM3.3; tr|A0A3Q0DM17|A0A3Q0DM17_TARSY polypeptide sequence
MPMKRMYSNIYFDHFNNQRLLSGQNAPWLCFKVERVENCMLVPLETGVFGNQVSGCCGKTERPVEPTSLTRSVLVSPNPGTELRAQQPSRKGHLGKLGCVEYPSPGLALVMLGYGASTYCPDSSMYCPETCHHPEMCFLYWFEKTLSHEEQYQITWYVSWSPCVNCAEEVAEFLSVHPKVNLTIYAARLYCYQKLNHRQGLRRLCKEGACVKIMNYEEFDHCWENFVYNNYKSFKPWVKLQDNYELLATELDKILRIPMERMPQKKFRFHFQNLIAKDRNTTWLCFEVKNVRKKHPPDLLERGIFQNQVTPRINCHAEMCFLSWFLENMLLHGKRYQVTWYISWSPCSICAEEVAEFLSAHPKVSLTIYAARLYYFWVPGYRQGLRRLVEEGARVEIMNYEEFDYCWENFVSINNEPFQPWEGLHEKYGYLVTKLNNILG

SEQ ID NO: 73 - protein, 453 aa, synthetic construct
  REGION 1..453: note = pYY-BEM3.4; tr|A0A3Q0DNJ5|A0A3Q0DNJ5_TARSY polypeptide sequence
MEDNPEPRPRQQMDQDTFIFNFNNDPSVRGRHQTFLCYEVEHLDDDTWVPQDKYLGFLHNQPQSRSNAYCAYHAELCFLELVSSWQLDPAQRYRVTCFISWSPCSSCAQEVAAFLKKNRHVTLRILAARIYDYYQGYEDGLRTLQGVGVDITVMTSAEFGHCWNTFVDHQGSPFQPWEGLDQHSQVIWQRMQDILQVIPAKYLMEKVKYTVTVDILFKGRVPGPRYLMDQNTFTRNFINNLSVSGRRQTLLCYEVERLGGDIWVPLDQLRGFLLSQARDVLNYYQGRHAEPCFLDLVSSWQLDPAQHYRVTWFISWSPCTSCAQAVAAFLRENRHVTLRILAARIYDYHQGYEEGLRTLQRTGAHIDIMTFKEFGHCWNTFVNHKGSPFKSWTGLDQHSQALRKRLQDILHTMASSLWDQSEPKKPIPSQEVTLPESIPPSHGNRFRLVKRPS

SEQ ID NO: 74 - protein, 424 aa, synthetic construct
  REGION 1..424: note = pYY-BEM3.5; tr|G5AYU5|G5AYU5_HETGA polypeptide sequence
FCFLSCVHRKPIERIYKKAFRFYFRNLRCAYGRNKTFLCYEVKRERDNKVLHKGVVLNQVEPYMPLHAELRFLSWFHDTLLCPLGSYQVTLYVSWSPCSECAEELTTFLAGHRNVTMTIYVAQLYYCNWKSPNREGLKILIAEDARLRVMFYDEFLYCWRNFVKNDYNNFDPWSLLDENSRYHNRILQNILKGWGRPHRVGPEGEQTATPGGSGGHCISVFSLLRRREMTLKEETFRVQFNNAYKAPKPYRRRVTYLCYQLQEANGDPLTKGCLRTKKGYHAESRFIKRICSMDLGQDQSYQVTCFLTWSPCPHCAQELVSFKRAHPHLRLQIFTARLFFHWKRSYQEGLQRLCRAQVPVAVMGHPEFAYCWDNFVDHQPGPFEPPWAKLEYYSSCLKRRLQQILRSWGVDDLTNDFRNLQLGP

SEQ ID NO: 75 - protein, 385 aa, synthetic construct
  REGION 1..385: note = pYY-BEM3.6; tr|A0A2Y9QMV5|A0A2Y9QMV5_TRIMA polypeptide sequence
MLSSPQTPGTRKPMKTLAPDEFSFNFENLRLAHGRNTTFLCFQVETKAPPSLNSPDSGIFQNQDHCPSHHHAEMVFLTWFQKRLSPAQHYEVTWYMSWSPCSRCAVQVAKFLKSNSTVNLSIFVARLYYPRELETKDGLHSLWQAGAQVQIMFFQDFKYCWENFVNNEGKPFQPWKNLDENSKDWDTELKDIHRNTTDLLTEEMFYSQFYNREKKSSIPRKTYLCYQLNEPQPVKRCLHYKKGYHAVTRFIDGIVSMNLDPARSYDITCYFTWSPCNRYARKLVSFIEDYPNLRLKVYTSRLYFHWCWTNMQGLQHLQNSRVTVAVMTFRDFEYCWKNFVDNQGKPFEPWEKLDLYSQSTERRLRRILKPLTPDVLNEDFGNLHL

SEQ ID NO: 76 - protein, 381 aa, synthetic construct
  REGION 1..381: note = pYY-BEM3.7; tr|H0XHI0|H0XHI0_OTOGA polypeptide sequence
LSCAFRDPMNRMYPKTFCQNFEKEPCPSNQNSSWLCFEVETKNSAVFFHRGVFRNQPAPPPRAPTSVLLSQGPVKTPCHAEECFLTWIQGVLPPDHHYHVTWYVSRGPCANCANLIVHFLAMHRRVTLTIFAAHLNFFWESDFQQGLLRMDQEGVQLHIMGYEEFEYCWDNFVYNQRKQFVPWNGLNENYEFMVSTLEDILRSPLDRIRQKDFSIHFRNSLWLDDKSTWLCFEVKRTKSPVPLYRGVFRNQSPPKTPCHAEVRFFTWLQDLPPDFCCQFTWYLSWSPCADCADLVANFLAKHRNVSLTIFVARLYYYRDPEMHRGLRRMYQEGANVDIMSVIEFEYCWDNFVYNQGKQFVPWNGLNENYEFLVPRLQEILE

SEQ ID NO: 77 - protein, 337 aa, synthetic construct
  REGION 1..337: note = pYY-BEM3.8; tr|A0A3M0K4Y7|A0A3M0K4Y7_HIRRU polypeptide sequence
MYISKKALRRHFDPRVYPRETYLLCELQWEGSRRVWIHWIRNVPDHHAEEYFLEEVFEPRNYGFCNITLYLSWSPCCTCCSKIRDFLKRNPNVKIDIRVARLIYPDYAETRSSLRELNGLQRVSIQVMEAAGLSCIESKNHRISQVERDPKGSSSPTLFTLQDHLKLSNMTESVIQDSVSIQICYQMRILGFQCHIRWKLQPEDFQRNYSPNQIGRVVYLLYEVRWRRGSIWRNWCSNNPEQHAEVNFLENHFHHRPQTPCSITWFLSTSPCGKCSRRILEFLKSQPNVTLEIYAAKLFRHHDIRNRQGLRNLMMNGVTIYIMNLEGNPASLCLSVD

SEQ ID NO: 78 - protein, 237 aa, synthetic construct
  REGION 1..237: note = pYY-BEM3.9; tr|A0A3P4LUZ8|A0A3P4LUZ8_GULGU polypeptide sequence
MSFEDYEYCWETFVDHKGMYFQSWDLLRDNDLLAAELKNILRSTMNPLRQEIFYHQFGNQPRAPRPYHRRKTYLCYQLQPHEGPITARVCLQNKKKRHAEIRFIDNIRALRLDRSQTFEITCYLTWSPCPTCAKALAVFVQDHPHISLRLFASRLFIHWCWKYQEGLRLLHRSRIPVAVMRLQEFEDCWRNFVDNQDEPFQPWNKLEQYSESITRRLRRILGHPQNNLENDFRNLHI

SEQ ID NO: 79 - protein, 221 aa, synthetic construct
  REGION 1..221: note = pYY-BEM3.10; tr|G5BPM8|G5BPM8_HETGA polypeptide sequence
RRRIEPWQFEASFDPRQLRRETCLLSEVRWGTSPRAWRGCSLNTARHAEVSFMDRLTSEGRLRGPVRCSITWFLSWSPCGACAQAIGEFLRQHPNVSLVIYIARLFWHVDEQNRQGLRDLVTRGVRMQVMSDPEFAHCWRNFVNYSPGQEARWPQVPPVWTWLYSLELHCILLNLPPCLKISRRHHNQLTFFQLILQNCHYQAIPSPVLLASGLIHPFVTW

SEQ ID NO: 80 - protein, 211 aa, synthetic construct
  REGION 1..211: note = pYY-BEM3.11; tr|H2M862|H2M862_ORYLA polypeptide sequence
MITKLDSVLLPKKKFIYHYKNMRWARGRHETYLCFVVKRRVGPESLSFDFGHLRNRNGCHVELLFLRHLSALCPGLWGYGATGQGRVSYSITWFCSWSPCANCSFRLAQFLSQTPNLRLRIFVSRLYFCDLEDSREREGLRMLKKVGVHITVMSYKDYFYCWQTFVARKQSKFKPWDGLHQNSVRLSRKLNRILQPCETEDFRDAFKLLGL

SEQ ID NO: 81 - protein, 353 aa, synthetic construct
  REGION 1..353: note = pYY-BEM3.12; tr|H0Y0C6|H0Y0C6_OTOGA polypeptide sequence
MYLKTFYRHFNNRPYLSRRNDTWLCFEVKTTSSNSPGSFYSGVFRNQGPRYCPWHTELCFLTWVRPIVSHHHFYQITWYMSWSPCANCAWQVATFLATHENVSLTNYTVRIYYFWRQDYRQGLLRMIEEGTQVYVMSSKEFQHCWENFVDHWGTRWVTCWNRLKKNYEFLVTRLSEILSDPKERISPNTFYNQFNNTPVPRGRKDTWLCFEVKEKNSNSPGSFHRGVFQNQVFSGTSSHARRCPPDHHYEVTWYTSWSPCAHCAWHVVNFLTSNPNVSLTIFAARLYYIYRPEIQQGLRRVFQEGAKVHIMSLKEFKYCWAKLVYNSGMRFMPWYQFNFNFLFPNTTLKGDLH

SEQ ID NO: 82 - protein, 189 aa, synthetic construct
  REGION 1..189: note = pYY-BEM3.13; tr|A0A3Q2Z5X6|A0A3Q2Z5X6_HIPCM polypeptide sequence
MDVHFMNFIYHYKNMRWAKGRNETYLCFVVKRRVGPNSLTFDFGHLRNRNGCHVELLFLRYLGRRLSYSITWFCSWSPCANCSAALSQFLSRMPNLRLRIFVARLYFCDMEDSHEREGLRLLQKAGVQVTVMSYKDYYYCWQTFVDRKKSHFKAWEDLHQNSVRLSRKLNRILQPCEMDLRDAFKLLGL

SEQ ID NO: 83 - protein, 190 aa, synthetic construct
  REGION 1..190: note = pYY-BEM3.15; tr|A0A2K6NY90|A0A2K6NY90_RHIRO polypeptide sequence
MNPHIRNPMEAMYPGTFYFHFKNLWEADNRNESWLCFAVEVIKHHSTVSWKRGVFRNQVDPETHCHAEKCFLSWFCDNTLSPKKNYQVTWYTSWSPCPECAREVAKFLARHSNVMLTIYTARLYYSQYPNYQEGLRRLNEEGVPVEIMDYEDFKYCWENFVYNGDELFKPWKGLKYNFLFLDSKLQEILE

SEQ ID NO: 84 - protein, 202 aa, synthetic construct
  REGION 1..202: note = pYY-BEM3.16; tr|Q6ICH2|Q6ICH2_HUMAN polypeptide sequence
MNPQIRNPMERMYRDTFYDNFENEPILYGRSYTWLCYEVKIKRGRSNLLWDTGVFRGPVLPKRQSNHRQEVDPETHCHAERCFLSWFCDDILSPNTNYEVTWYTSWSPCPECAGEVAEFLARHSNVNLTIFTARLCYFWDTDYQEGLCSLSQEGASVKIMGYKDFVSCWKNFVYSDDEPFKPWKGLQTNFRLLKRRLREILQ

SEQ ID NO: 85 - protein, 202 aa, synthetic construct
  REGION 1..202: note = pYY-BEM3.17; tr|G8GPV1|G8GPV1_CERNE polypeptide sequence
MDGSPASRPGHVMDPGTFTSNFNNKPWVSGQRETYLCYKVERSHNDTWVLLNQHRGFLRNQAKNRLHGDYGCHAELCFLGEVPSWRLDPTQTYRVTWFISWSPCFSGGCAEQVRAFLQENTHVRLRIFAARIYDYDFLYQEALRTLRDAGAQVSIMTYEEFKHCWDTFVDHQGRPFQPWDGLDEHSQALSGRLQAILQNQGN

SEQ ID NO: 86 - protein, 181 aa, synthetic construct
  REGION 1..181: note = pYY-BEM3.18; tr|Q1WBT6|Q1WBT6_SYMSY polypeptide sequence
MALLTAKTFRLQFNNKRRVTKPYYPRKALLCYQLTPQNGSTPTRGYFKNKKKRHAEIRFINKIKSMGLDETQCYQVTCYLTWSPCPSCAWELVDFIKAHDHLNLGIFASRLYYHWCRHQQEGLRLLCGSQVPVEVMGFPEFADCWENFVDHEEPLSFNPSEMLEELDKNSRAIKRRLEKIK

SEQ ID NO: 87 - protein, 211 aa, synthetic construct
  REGION 1..211: note = pYY-BEM3.19; tr|A0A3B4CS14|A0A3B4CS14_PYGNA polypeptide sequence
MDNTNRRKFIYHYKNVRWARGRHETYLCFVVKKRNSPDSLSFDFGHLRNRNGCHVELLFLRYIEVLCPGLWGSGVDGVRVSYAVTWFCSWSPCSNCAQRLTNFLSQTPNLRLRIFVARLYFCDEEDSLEREGLRHLQRAGVQITVMTYKDFFYCWQTFVASRERCFKAWEGLRQNSVRLSRKLNRILQVFISTPVISPLITTHLGQSWAGG

SEQ ID NO: 88 - protein, 315 aa, synthetic construct
  REGION 1..315: note = pYY-BEM3.20; tr|A0A087XZI4|A0A087XZI4_POEFO polypeptide sequence
RKVSYSVTWFCSWSPCANCSIRLAQFLHQTPNLRLRIFVSRLYFCDLEDSREREGLRILKKAGVHITVMSYKDYFYCWQTFVAKSQSKFKPWDGLHQNYIRLSRKLNRILQPALDIKKFIYHYKNLRWARGRCETYLCFVVKKKLHLFMFVIVGRNRLFDLNVTMNNKSLYLIPLHLQLLFLRHLGALCPGLWGYGVTGERKVSYSVTWFCSWSPCANCSIRLAQFLHQTPNLRLRIFVSRLYFCDLEDSREREGLRILKKAGVHITVMSYKDYFYCWQTFVAKSQSKFKPWDGLHQNYIRLSRKLNRILQVQFF

SEQ ID NO: 89 - protein, 189 aa, synthetic construct
  REGION 1..189: note = pYY-BEM3.21; tr|A0A341AEK4|A0A341AEK4_9CETA polypeptide sequence
MASDRGPSAGDATSRRRIEPWEFEVSFDPRELCKETRLLYEIKWGRSQHVWRHSGKNTTNHVECNFIEKFTSERPFHRSVSCCITWFLSWSPCWECSKAIREFLNQHPRVTLFIYVARLFQHMDPQNRQGLRDLIHSGVTIQIMGPTEYDYCWRNFVNYPPGKEAHWPRYPPPLMKLYALELHCIILVP

SEQ ID NO: 90 - protein, 180 aa, synthetic construct
  REGION 1..180: note = pYY-BEM3.22; tr|E2D879|E2D879_MUSMI polypeptide sequence
RNLISRETFNFNFENLCYAKGRKNTFLCYEVTRKDCDSPVSLCHGVFKNKGSIHAEICFLYWFHDKVLKVLTPREEFKVTWYMSWSPCFECAEQVVRFLATHHNLNLTIFSSRLYNVSDPDTQQKLCRLVQEGAQVAVMDLSEFKKCWEKFVDNDGQQFRPWKRLRTNFRYQNSKLQEIL

SEQ ID NO: 91 - protein, 221 aa, synthetic construct
  REGION 1..221: note = pYY-BEM3.23; tr|A0A2K5RDN6|A0A2K5RDN6_CEBCA polypeptide sequence
MWEAQSPGLSREWGSVAISPEDPGPLHIGRFLSCAFRHPMNAMYPGIFNFHFRNLRKAYGRNETWLCFTVEGIMNRSTVSWKSGVFRNQVGSDPFCHAEMCFLSWFRHNMLSPKKDYEVTWYASWSPCPECAGQVAEFLARHGNVRLTIFTAHLYYFWNPSFRQGLRRLSQEGASVLIMGYEDFEYCWDNFVYNDGQPFKPWKRLQDNSLSLYITLQEILQ

SEQ ID NO: 92 - protein, 206 aa, synthetic construct
  REGION 1..206: note = pYY-BEM3.24; tr|A0A2K5RDN7|A0A2K5RDN7_CEBCA polypeptide sequence
MEASPASRPRPLMGPRTFTENFTNNPEVFGRHQTYLCYEVKCQGPDGTRDLMTEQRDFLCNQARNLLSGFDGRHAERCFLDRVPSWRLDPAQTYRVTCFISWSPCFSCAREVAEFLQENPHVNLRIFAARIYDCRPRYEEGLQMLQNAGAQVSIMTSEEFRHCWDTFVDHQGHPFQPWEGLDEHSQALSRRLQAILQGNRWMILSL

SEQ ID NO: 93 - protein, 184 aa, synthetic construct
  REGION 1..184: note = pYY-BEM3.25; tr|A0A1C9CJ69|A0A1C9CJ69_CERAL polypeptide sequence
NPMKAMDPHIFYFHFKNLRKAYGRNETWLCFAVEIIKQRSTVPWRTGVFRNQVDPESHCHAERCFLSWFCEDILSPNTDYRVTWYTSWSPCLDCAGEVAEFLARHSNVELAIFAARLYYFWDTHYQQGLRSLSEKGASVEIMGYEDFKYCRENFVCDDGKPFKPWKGLKTNFRFLKRRLQEILE

SEQ ID NO: 94 - protein, 197 aa, synthetic construct
  REGION 1..197: note = pYY-BEM3.26; tr|A0A2R2Z4D2|A0A2R2Z4D2_PTEAL polypeptide sequence
MHLQVWRKVTEAWREGYTLKPWSRNPMERLYHDYFYFHFYNLPTPKHRNGCYICYQVEGTKKHSRMPLLRGVFENQESLDMMLSPGEKYRVTWYISWSPCFACVDEVIKFLREHTNVELIIFAARLYHSDILQYRQGLRKLHDAGVHVAIMSYYEFKHCLNDFVFHQGRSFCPWNDLNKNSKNLSNTLEDILRNQED

SEQ ID NO: 95 - protein, 206 aa, synthetic construct
  REGION 1..206: note = pYY-BEM3.27; tr|B7T161|B7T161_SHEEP polypeptide sequence
MTEGWAGSGLPGRGDCVWTPQTRNTMNLLRETLFKQQFGNQPRVPPPYYRRKTYLCYQLKELDDLMLDKGCFRNKKQRHAEIRFIDKINSLNLNPSQSYKIICYITWSPCPNCASELVDFITRNDHLNLQIFASRLYFHWIKPFCRGLHQLQKAGISVAVMTHTEFEDCWEQFVDNQLRPFQPWDKLEQYSASIRRRLQRILTAPT

SEQ ID NO: 96 - protein, 205 aa, synthetic construct
  REGION 1..205: note = pYY-BEM3.28; tr|A0A2R2X2G4|A0A2R2X2G4_PTEAL polypeptide sequence
MAGLGQACEGCCGQMPEISYPMGRLDPKTFSFEFKNLPYAYGRKSSYLCFQVEREQHSSPVPSDWGVFKNQFCGTEPYHAELCFLNWFRAEKLSPYEHYDVTWFLSWSPCSTCAEEIAIFLSNHKNVRLNIFVSRIYYFWKPAFRQGLQELDHLGVQLDAMSFDEFKYCWENFVDNQGMPFRCWKKVHQNYKSVLRKLNEILRRR

SEQ ID NO: 97 - protein, 309 aa, synthetic construct
  REGION 1..309: note = pYY-BEM3.29; tr|G1Q1M4|G1Q1M4_MYOLU polypeptide sequence
YAELSFLDLFQSWNLDRGRQYRLTWYMSWSPYPDCAQKLVEFLGENSHVTLRIFAADIHSLCSGYEDGLRKLRDARAQLAIMTRDELQYCWVTFVDNQGQPFRPWPNLVEHIKTKKQELKDILGNPMRRMYPKTFNFNFQNLNSYGRKSTFLCFEVETWEDGSVLDYQNGVFQNQLDPGHAELCFIEWFHEKVLFPDEVRCPDAQYHVTWYISWSPCFECAEQVAGFLNEHENVDLSISAARLYLCEDEDEQGLQDLVAAGAKVAMMAPEDFEYCWDNFVYNRGWPFTYWKHVRRNYGRLQEKLDEILW

SEQ ID NO: 98 - protein, 216 aa, synthetic construct
  REGION 1..216: note = pYY-BEM3.30; tr|A0A1S3AN78|A0A1S3AN78_ERIEU polypeptide sequence
RRIEPWEFEDFFDPRQFRPETCLLYEVRWGSSRNAWRSTARNTTRHAEVNFLERFAAERHFDKPVSCSITWFLSWSPCWECSQAIGAFLSQHPQVTLAIHVTRLFHHEDEQNRQGLRDLLARGVTLQVMGDSEYAHCWRTFVNSPPGAEGHYPRYPSDFTRLYALELHCIILGLPPCLEILRRYQNQFTLFRLVPQNCHYQMIPHLNFFVVRHYFF

SEQ ID NO: 99 - protein, 201 aa, synthetic construct
  REGION 1..201: note = pYY-BEM3.32; tr|Q4VUI3|Q4VUI3_XENLA polypeptide sequence
MTMDSMLLKRNKFIYHYKNLRWARGRHETYLCYIVKRRYSSVSCALDFGYLRNRNGCHAEMLFLRYLSIWVGHDPHRNYRVTWFSSWSPCYDCAKRTLEFLKGHPNFSLRIFSARLYFCEERNAEPEGLRKLQKAGVRLSVMSYKDYFYCWNTFVETRESGFEAWDGLHENSVRLARKLRRILQPPYDMEDLREVFVLLGL

SEQ ID NO: 100 - protein, 191 aa, synthetic construct
  REGION 1..191: note = pYY-BEM3.33; tr|E2RL86|E2RL86_CANLF polypeptide sequence
MNPLQEETFYQQFSNQRVPKPTYQRRTYLCYQLKPHEGSVIAKVCLQNQEKRHAEICFIDDIKSRQLDPSQKFEITCYVTWSPCPTCAKKLIAFVNDHPHISLRLFASRLYFHWRQKYKRELRHLQKSGIPLAVMSYLEFKDCWEKFVDHKGRPFQPWNKLKQYSESIGRRLQRILQPLNNLENDFRNLRL

SEQ ID NO: 101 - protein, 226 aa, synthetic construct
  REGION 1..226: note = pYY-BEM3.34; tr|G1LWB0|G1LWB0_AILME polypeptide sequence
SSAAPASIHLLDEDTFTENFRNDDWPSRTYLCYKVEGPDQGSGVPLGQDKGILHNKPAQGPEPSRHAECYLLEQIQSWNLDPKLHYGVTCFLSWSPCAKCAQKMARFLQENSHVSLKLFASRLYTRERWDEDYKEGLRTLKRAGASIAIMTYREFEHCWKTFVLHDQEGSCFQPWPFLHKESQKFSEKLQAILQVGVLLLSLPPPLPSSPLSSPWPFPAPLRASTG

SEQ ID NO: 102 - protein, 238 aa, synthetic construct
  REGION 1..238: note = pYY-BEM3.35; tr|A0A1U7S7K7|A0A1U7S7K7_ALLSI polypeptide sequence
MGEHWQYAGSGEYIPQDQFEENFDPSVLLAETHLLSELTWGGRPYKHWYENTEHCHAEIHFLENFSSKNRSCTITWYLSWSPCAECSARIADFMQENTNVKLNIHVARLYLHDDEHTRQGLRYLMKMKRVTIQVMTIPDYTYCWNTFLEDDGEDESDDYGGYAGVHEDEDESDDDDYLPTHFAPWIMLYSLELSCILQGFAPCLKIIQGNHMSPTFQLHVQDQEQKRLLEPANPWGAD

SEQ ID NO: 103 - protein, 220 aa, synthetic construct
  REGION 1..220: note = pYY-BEM3.36; tr|A0A2R2X2J8|A0A2R2X2J8_PTEVA polypeptide sequence
MPRIGNMNLLSEKTFNYHFGNQLRVKKPQGRRRTYLCYKLKLPNETLVKGYFINKKKNHAEIRFINKIRSLNLDQTQSYKITCYITWSPCSYCAGKLVALVKSCPHLSLQIFTSRLYYHWLWKNQAGLRYLWKINISVLVMKEPEFADCWDNFVNHQSRRFKPWEKLTQYSNSTERRLLRILRINRTDLFLAQSSEQDPGLNDLVDAIKRLFLDAHRPRD

SEQ ID NO: 104 - protein, 198 aa, synthetic construct
  REGION 1..198: note = pYY-BEM3.37; tr|A0A151P6M4|A0A151P6M4_ALLMI polypeptide sequence
MAVEEEKGLLGTSQGWKIELKDFQENYMPSTWPKVTHLLYEIRWGKGSKVWRNWCSNTLTQHAEVNCLENAFGKLQFNPPVPCHITWFLSWSPCCQCCRRILQFLRAHSHITLVIKAAQLFKHMDERNRQGLRDLVQSGVHVQVMDLPDYRYCWRTFVSHPHEGEGDFWPWFFPLWITFYTLELQHILLQQHALSYNL

SEQ ID NO: 105 - protein, 158 aa, synthetic construct
  REGION 1..158: note = pYY-BEM3.38; tr|A0A2K6MNR2|A0A2K6MNR2_RHIBE polypeptide sequence
IWLCFTMEIIKQCSTVSWKRGVFRNQVDPETHCHAERCFLSWFWEDTLSPNTNYQVTWYTSWSPCLDCAGEVAEFLARHSNVKLAIFAARLYYFWDTDYQQGLRSLSEEGTSVEIMGYEDFKYCWENFVYNGDEPFKPWKGLKYNFLFLDSKLQEILE

SEQ ID NO: 106 - protein, 182 aa, synthetic construct
  REGION 1..182: note = pYY-BEM3.40; tr|F1CGT0|F1CGT0_ANOCA polypeptide sequence
KAAILLSNLFFRWQMEPEAFQRNFDPREFPECTLLLYEIHWDNNTSRNWCTNKPGLHAEENFLQIFNEKIDIKQDTPCSITWFLSWSPCYPCSQAIIKFLEAHPNVSLEIKAARLYMHQIDCNKEGLRNLGRNRVSIMNLPDYRHCWTTFVVPRGANEDYWPQDFLPAITNYSRELDSILQD

SEQ ID NO: 107 - protein, 230 aa, synthetic construct
  REGION 1..230: note = pYY-BEM3.41; tr|C7AGG3|C7AGG3_HORSE polypeptide sequence
MDPQAPTQRGGLGQAYQGGDYVQAPGNGNTQHLLSEDVFKKQFGNQRRVTKPYYRRKTYVCYQLKLLRGPTIAKGYFRNKKKRHAEIRFIDKINSLGLDQDQSYEITCYVTWSPCATCACKLIKFTRKFPNLSLRIFVSRLYYHWFRQNQQGLRQLWASSIPVVVMGYQEFADCWENFADNRGNPFQSWEKLTEYSKGIKRRLQKILEPLNLNGLEDAMGNLKLGSVDLG

SEQ ID NO: 108 - protein, 197 aa, synthetic construct
  REGION 1..197: note = pYY-BEM3.42; tr|A0A250YMK7|A0A250YMK7_CASCN polypeptide sequence
MSLLKEDIFLYQFNNQQQVQKPYFRRRTYLCYQLEQPNGSRPQWPAKGCLQNKKGHHAEIRFIKRIHSMGLEQDQDYQITCYITWSPCLACACALAELKNHFPRLTLRIFASRLYFHWIRKFQMGLQHLYKSGVLVAVMSLPEFTDCWEKFVNHRQVFFTPWDKLEEHSRSIQRRLRRILQSWDVDDLTDDFRNLRL

SEQ ID NO: 109 - protein, 189 aa, synthetic construct
  REGION 1..189: note = pYY-BEM3.43; tr|B7T160|B7T160_SHEEP polypeptide sequence
MPWISDHVARLDPETFYFQFHNLLYAYGRNCSYICYRVKTWKHRSPVSFDWGVFHNQVYAGTHCHSERRFLSWFCAKKLRPDECYHITWFMSWSPCMKCAELVAGFLGMYQNVTLSIFTARLYYFQKPQYRKGLLRLSDQGACVDIMSYQEFKYCWKKFVYSQRRPFRPWKKLKRNYQLLAAELEDILG

SEQ ID NO: 110 - protein, 541 aa, synthetic construct
  REGION 1..541: note = pYY-BEM4.1; tr|A0A182D0J1|A0A182D0J1_BLAVI polypeptide sequence
MTNPESPPQAPCDFNEDALLNREPLRGSPIKFVSPVDYPDLVFALAGPVGVDIDYIQQSISDCLKSFDYSTEFIRITEIMQDIKCSKTIDCTDMLKEYQSKIEYANELRRAYRAKDLLAALTISAISKLREQIKERDEATNKSNIQPSRRKLAWVVRQLKTPEEVRLLRAVYGKQFVLVSIYSSPQRREDFLISKIKIKSRGTIDNNTSSEGAQRLIERDSKEDNEYGQNLSGTFCLGDIFVDSNNKESAIVSIDRFLNAFFGSNEISPTRDEYGMYLAKTASLRSCDLSRQVGAAIFSKTGEIISLGSNEVPKAGGGTYWTGDNADSRDIRLGHDPNEINKVEIFAEIISRLLEDKLLSNDLLNKDAASIVTILLSKNEGKRYKDLRVMDIIEFGRIIHAEMSAICDAARNGRAIIGATLFCTTFPCHLCAKHIVASGIGRIVYLEPYPKSYAKKLHSDSIQVEDHSDSEKVSFEPFIGISPSRYRELFEGGRRKDPFGEALKWKNDPRKPVIDVVVPPHFEAEKLVIAQLGKLIVSGTG

SEQ ID NO: 111 - protein, 330 aa, synthetic construct
  REGION 1..330: note = pYY-BEM4.2; tr|A0A2D6EXD2|A0A2D6EXD2_9ARCH polypeptide sequence
MIIGLVGTIGAGKQTIIDYLQEKYGYNALSCSDVLREILKKQGKPVTRDNLREIGNKTREEGGNGAIAKILLEKLRNNWKANYIVDSLRHPDEVSVLRTSPLFHLVAVDADLRIRFERVKARKREEEPTTLPAFVERDQKEMFGTGNEQRIRETMELADELVLNNGTVEELKQRIDDLNLVSDERLRPSWDDYFMRLARLAAQRSNCMSRKVGAIITKDRRVIATGYNGTPRGVKNCNEGGCERCNSAVAKGTAISECLCLHGEENAIIEAGRVRSEGATIYTSFLPCLWCTKMIIQAGLKEVVFSEVYDLHEASIKLFETSGVLIRRLK

SEQ ID NO: 112 - protein, 367 aa, synthetic construct
  REGION 1..367: note = pYY-BEM4.3; tr|F7YVM7|F7YVM7_9THEM polypeptide sequence
MNEFKYMSLALKLAKKGKYTTSPNPMVGAVIVKDGKILATGYHKKAGQPHAEINALSKLNFQAQNCEMYVTLEPCSHYGRTPPCADAIIRSGIRKVVIATLDPNPLVNGKGVEKLKNAGIEVVCGVLEEKAKKLNEKFFKYITTKIPFVALKIAQTLDGKIALKNGESKWITSEKSREYVHKLRMEYDAVLTGIGTILKDDPQLNVRLKKVYKQPLRIILDSKLKIPLSAKVLEDPSKVIILTTALADKEKLEELRSKGVEVIITNEKNGIVDLESALKILGEKKITSVMVEAGPTLLTSFLKESLFDKIYLFIAPKIFGADSKSVFSELGLEDISKSQKFSLESVKKIGEDLLLELYPKQLKKLEE

SEQ ID NO: 113 - protein, 449 aa, synthetic construct
  REGION 1..449: note = pYY-BEM4.4; tr|A0A3M6UNF1|A0A3M6UNF1_9CNID polypeptide sequence
MEEKSELENELMRSTSPKPSVPNGSKGNECEQRETRITKENLYMVLALWMEEFPVVEQTSSAKRLNKVGVVFVLPTDRVLAADCSRDGVHGVARVMVNHCGKLEGCKVFVSRKPCSLCAKLLVQSKVSRVFYLPIEPESENKGEIARADNLFKNSSVGQSVFVPCVEQKVLDKLEDKLPKEIITPDDISECRDNLLKKCGWSAEWFARAQASLPWPCFEGKMKSQVDNDFKSLIKWIAVVKAPMDKGVAFPKVKLTSDSRVVPDCDADNFPDSKTAYHMMIFAKMLARQTDDPKTGVGAVIVRGKVPDIVSLGWNGFPSKALYGEFPRASDDDRALQKKFPYVIHAEQNALMVRNVKDLTDGILFVTKPPCDECAPMIKLSGVKTIVIGEKIEKSRGGELSYNLIKEYIKEGIMTCYQMEATKTKAKRLASDPETRKRLKSSCSNSNDV

SEQ ID NO: 114 - protein, 414 aa, synthetic construct
  REGION 1..414: note = pYY-BEM4.5; tr|A0A2G3K826|A0A2G3K826_9BURK polypeptide sequence
MTKIIDDVNTAAAAVLDQATAAANQTTFAVGGVMVNNQTGEVISAIHNNVIIPLSNNVSFTFDPTAHGERQLVYWYYANKEALKLPEPNQITVITSLDPCAMCTGALLTAGFNVGVVAIDTYAGINCAQNFQFATLPANLRTKAQKNFGYYASGAANFKPLTRSYVGGPSVAFKNGVVTPANLRDCGTVFTQSVDTVRNTSNSTGLAPSQMSNPAELPSNSAILQAYRAIYKKAFTIKIDNPRLPDAQILTELKAVLADAPNARNAVAFIDPFGNLVLCMADAFNTSPVHAAFMNVTQEYAKTRWDLMNKYAQASTTDNPALYLTHPKYGTFVYLYAPDPDDSITIMSLGAYGSTMEGPIPNMFPSNLQFYYPPRNGAQFSELVPVVNELPPFYTQNVNISLMQVPGVTQAPTK

SEQ ID NO: 115 - protein, 308 aa, synthetic construct
  REGION 1..308: note = pYY-BEM4.6; tr|K1ZCJ4|K1ZCJ4_9BACT polypeptide sequence
MSSRAKKNRSTNLKKSIGQKSIENKPTDQKKDQVLVAYVPVIHEGYRRFFRHFPAVKELWLISQELSHELRSLQKDIRALKASETKKLLQTWGQFQKIKLLTPSSLAILQKTTTQLVFPDEEISHHLVEKYFAQNRVLFASFFLRWDKKSSLKKHDLQEYSEISNKEFDQMMIAIAQQEADKSDDWWRQVGGLIFKDETILLLAHNQHTPTEAEAYFAGDPRADFHQGEYLKISTAIHAEAYLIAQAAKQGISLEGADLYVTTFPCPVCAKQVAYSGIKRVFFREGYSLLDGETILKANGVKLIRVTV

SEQ ID NO: 116 - protein, 615 aa, synthetic construct
  REGION 1..615: note = pYY-BEM4.7; tr|A0A1G3PNQ8|A0A1G3PNQ8_9SPIR polypeptide sequence
MRDLPLLVLGLTGPMGAGCTRFARDISKMEPGKVIKKQGLLDQVAHEISELSKKASEIRLQCISNGKNSELAELKRLNRRLNAKLAERACLHVIAKSSLPEPLFISLNTIVIKIAVDSITAPEFAEWAKNHAKVADLLKWLRTQWESELTLYETWGQDAGRFSQDELEKMDAMFAEFERIGDEILKEDFETYFGKRNNDFSIRMFSENIRLSGNPFRPAENGGGGGKYDEPSMVMIARETDRYIRFYRTRSDQKRSHFFIIDEIKNPREAEYFRARHQNFFLVSIFSSSEIRASRMRRGLGHDAGVSDADFQHLFRELDSRDWGADDFDAHGLHRQNIYRCFNLADIAINNDVEDERFSEVLFNKFIRYYALMLSPGCVQPTPQETYMHLAYSLSLRSTCISRQVGAVITDLEDRILSLGWNEVPEGQIGCGLKVKKDYTDKENPLFEMEIWDNVITAEDLAVWDDEDSICVKDILSRIEIKTKLKSVSLTPEERADVLKALRIKRLEYSRSLHAEENAILQVASRGGVGLKDGTIYVTTFPCELCSKKIYQVGISKIYYTEPYPNSISEKVILKDGIRNIKILQFEGVKSYSYFKLFKPGFDKKDAQMLEGRGI

SEQ ID NO: 117 - protein, 291 aa, synthetic construct
  REGION 1..291: note = pYY-BEM4.8; tr|A0A1G0PGF4|A0A1G0PGF4_9BACT polypeptide sequence
MKHNNQLRKEIEKLLGQNSIIKNDELKKLQKEYKIETDELLISFLPYAAEFAKVPISKYKVGAVVLGKSGNIYFGSNMEFEAGALSATVHAEQSAVNNAWLNGETGINKIAVTAAPCGYCRQFLNELTTAKQLHVLLKDKNLEAAKVFKLTELLPEAFGPRDLEIEGGLMKVENHKLKIENINDELINAALEAANKSYAPYSKNYSGVSIQLSDGTIFSGRYSENAAYNPSLLPFQSALAFMNMNTKKGSNNKIVDAVLVEAVSNISQKDAAGTLLNSISKTKLRYYKIKN

SEQ ID NO: 118 - protein, 398 aa, synthetic construct
  REGION 1..398: note = pYY-BEM4.9; tr|A0A0P4WGY5|A0A0P4WGY5_9EUCA polypeptide sequence
MEENSSATSQPKCASRTKQGGNDLSTDMSNLSVGETKRTDFLPWDDYFMAVAFLSAMRSKDPSSQVGACIVNADKKIVGIGYNGMPIGCSDDELPWNKESLDPLQTKYMYVCHAEMNAIMNKNSSDLAGCCVYVALFPCNECAKLVIQAGIREVVFFSDKHQQKPETVASKKMLNMAGVAYRQYTPSQSKIELNLSLKEQEKSEPTADITQSSERDQNSKRKDYLSWEEYFMAMAHLSALRSKDPITQVGACIVNSKKKIVGIGYNGMPLGCNDDLMPWGNSSSNKLETKYMYVCHAGVNAIMNKNSCDVSGCTLYVALFPCNECAKVIIQAGIKTIIYASDTNKDQASILASKKMLDMAGIKYRADNLSQRKIVIDFKTIDWNSRFMNDHQNDPTCL

SEQ ID NO: 119 - protein, 259 aa, synthetic construct
  REGION 1..259: note = pYY-BEM4.10; tr|A0A3D8IG27|A0A3D8IG27_9HELI polypeptide sequence
MRKNILYFILTLFFLSGLYATSLPEDNVVSGVIYEKIDTVSAEVDHIYPMLALAIVYKDWQEKNMLNKQGHNIGLVIVDENNMPVFWVRNSVHATHNGTQHGEVRLVSNLLNCEGFNKYLDKYTLYTTLEPCIMCAGMLSMVQIPKVVYAQKDLSCGNTQEIISTAKYPRYYKAFTVENGYKKDLEECFEQYKICKNDSITDFLVNDSAKEIFRKASNDLQDYKVKFKENRRVIKVAQEFLQNIQTKDNLDVLQCPKNM

SEQ ID NO: 120 - protein, 256 aa, synthetic construct
  REGION 1..256: note = pYY-BEM4.11; tr|A0A351C8C4|A0A351C8C4_9BACT polypeptide sequence
MNELTKQSEHLRNEALRIATRSYVPYTGQQEGVIILLENGDLIPGVRVENASFQLTIPALQNALSTMYALQRTDISMIVSSIPFTDSDLAYTGGMAEIAWEMVGASLLLVAGAHIPEAGTFIDPARGENLLDVSREAALNAFIPESDFPVGSAIQTSDDVVIDGCNVEHSDWSKIICAERNVLSTARSYGLGQITTIYVSCPKEPGGTPCGACRQVIVELAPDATVWMDRGNQEPIAMKATKLLPGHFTGNVLKKQ

SEQ ID NO: 121 - protein, 301 aa, synthetic construct
  REGION 1..301: note = pYY-BEM4.12; tr|A0A1G6V2K7|A0A1G6V2K7_PEPNI polypeptide sequence
MPIVRVNEIGARLPEDWEALETAIWQAYVSREDLPDAGELDLTLVDDATIQELNKTHRQLDKSTDVLSFPMYDDRDDLAADVQAGLPVILGDIMISVPTAERQAQAYGHSFKREMAYLLVHGLLHIAGYDHMSAEEKSAMRRAEEAILADVDVPRDTAPSKTAAVLDEADVQALIDAARAARLQAYAPYSGYAVGAALLAADGRRFCGVNVENASYGATCCAERTALFAAVTAGARDFIALALVTEGDEPAPPCGLCRQALAEFSPDLAIYLAGPTGETYRRTSLAALFPEAFSLSTKESV

SEQ ID NO: 122 - protein, 528 aa, synthetic construct
  REGION 1..528: note = pYY-BEM4.13; tr|F2NP91|F2NP91_MARHT polypeptide sequence
MPVMETHALEARFKEALARLCPEGRLLAAVSGGGDSVALLYLLKAAGRDTIVAHLDHALRPDSAADAAFVEKLAQRLGFPLETEHVDVRALAHRKRINLEAAAREVRYAFLARVARRWKARCILTAHTLDDNAETVLLQILRGAGRGLGIRPLQRRVARPLLEFSRAELRAYLEARGARWLEDPTNRSLELDRNYLRHAVLPRITARFPHALEALARFSQAQQADDWALEALSARHLIPDRRWPVPAYRALPLERAPEALRRRAIRGVLEALGVRPEARLVADVEAALGGRAQTLPGGVVVRRQRGTLFFIPPTVRFPKVQPPAGLEARPPRPGDYLVFPYGRKRLVDFLNERGVPRELKRRWPVGAVGAEVRWVYGLWPEPDEDRYMRRALVLARAAARQGEVPIGAVLVRDGAVLAEAANAVEASRDATAHAELLALRTALRRVGEKVLPGATLYVTLEPCPMCYGAILEARVARVVYGVENLKAGAFTVHGLEPRVALEAGRVEGECAKVLKDFFARLRPGRDGA

SEQ ID NO: 123 - protein, 226 aa, synthetic construct
  REGION 1..226: note = pYY-BEM4.14; tr|A0A316TX77|A0A316TX77_9BACT polypeptide sequence
MINGYTPYSGNQNTCYVKGESGTFYPGVRIENVSYPLTISSVQAAVCSCLANSDNPVEYYTGDHQPELLQVWADEYDMKPGGKLPDSPLKLFDPLVPSIPDIKKELDVLTEKSVTPNSGFPVSALLQTEKGYIRGVNIELSSWALGLCAERVAISRALTAGYTQFKSIHIYAPEADFVSPCGACRQVLLEVMPDADTELYHGDGTLSKHIVSDLLPFGFTSHKLKK

SEQ ID NO: 124 - protein, 321 aa, synthetic construct
  REGION 1..321: note = pYY-BEM4.15; tr|R6VYG3|R6VYG3_9FIRM polypeptide sequence
MIHKGTQTIETKRLILRAFTPDDAEAAFENWMSDPKVTEFLRWKTHADISDSRKIVNEWANGSADPEFYQWAIVPKDVNEPIGTISVVDRNDALGIFHIGYCIGSKWWHKGITSEAFSAVIHFLFEEVGANRIESQHDPENIHSGDVMKKCGLTFEGTLRQADFNNRGIVDACVYSILQSEWQNNTSVWQRLYNAALTVQNDRVVSPFIDAGGVAAALMTKKGNIYTGICIDTASTLGMCAERNAVANMLTNGESRIDKIVAVMPDGKVGAPCGACREYMMQLDRDSGDIEILLDLETEKTVRLKDLIPDWWGAERFGDTE

SEQ ID NO: 125 - protein, 229 aa, synthetic construct
  REGION 1..229: note = pYY-BEM4.16; tr|A0A3C1HZ18|A0A3C1HZ18_9BACI polypeptide sequence
MGDIMENWNELSEPWKRCFLQAWKAYCHGSIPIGAVLVDSEGEIFLEGRNRVHELTAPEGQLCDCRIAHAEMNVLVQVKTSDYEKLSGATIYSTMEPCIQCFGAIILSRIKNISFAAIDDKLAGATTLEDRHGFIKSRNLNIAGPFSHLGEIQIILRTDFLLRIFDSEYADPLIAAHEKDYPIGVALGRHYHRNNRLQVAKKETIPFGELFNEFSFDIKRAREGYTLGK

SEQ ID NO: 126 - protein, 205 aa, synthetic construct
  REGION 1..205: note = pYY-BEM4.17; tr|A0A1M6KV24|A0A1M6KV24_9BACT polypeptide sequence
MEASQQNILLKIEGKGPVAEINFTVTLPEWLVEQVQSGSTVFLTQKEKMRFVLELARKNVAQETGGPFAAAVFSLESGELVSAGVNVVVESRCSSAHAEVVALSLAQKAVDSHDLGAAGLPRMVLVSSAEPCAMCMGAIPWSGVKQVICGARDEDVRSVGFDEGAKPLEWVEDFAERGIEVIRDVLREEATEVLWDYRERGGEIY

SEQ ID NO: 127 - protein, 207 aa, synthetic construct
  REGION 1..207: note = pYY-BEM4.18; tr|A0A2U0T9B4|A0A2U0T9B4_9RHIZ polypeptide sequence
METAELISRLLDVIEKDIAPVTAKGVARGNKLFGAAILKKSDLAVIVAETNNEIENPLWHGEMQAIKRFFELPADQRPATRDCLFLATHEPCSLCLSGITWSGFDNFYYLFSHQDSRDGFAIPYDIQILKSVYAVPEPETGTVSPARDLYNRSNDFWTSHGLQDMIAGLARSNREALLARIDDLNALYAELSERYQRDKGGKGIPLP

SEQ ID NO: 128 - protein, 231 aa, synthetic construct
  REGION 1..231: note = pYY-BEM4.19; tr|A0A2K9PN08|A0A2K9PN08_9FLAO polypeptide sequence
MSDKKESKIKISKTSESIELDEIHSLLSYSIVQKFWENDDRNGRGYNVGVILVDENKNIVDWDINSVNKTENSTQHGEMRLISRYLDKDELYSLKGYTMYPTLEPCAMCAGMMTMTNVYRTVNGQMDYFYSKALERLSIDTRECGGYPPYPRTVISEISPSSISTRLDAEYKQYTNAGNKPIITKFLSTYKAKTIYDDAFNQFINFKCKFPENKTKYENAIKFYNSLPESI

SEQ ID NO: 129 - protein, 330 aa, synthetic construct
  REGION 1..330: note = pYY-BEM4.20; tr|F4PWM7|F4PWM7_CAVFA polypeptide sequence
MRFSLSLLFVILSVLLAGVLACKDPYNPETVDYGQCASATKANYEVRSDSKVLTPADLPADELAVHESRMRHIIDIARVNNKKFVSSIYFPNGTLACIGINTGKPNMIAHGEIVAIQNCTEIHGISMYTNYSIYTTGEPCSMCASAILWSRFKTVVWSTYNSDLYCKICMSNIPIDSSYIFSRAYGLGIEAPVAIGGVVKAEGDAWFGTYCNRPTSIYYIAPKCACQDPAKVSPLKFTQTRTTVWVEGGDKVVTQWNAIISNPSNSTIVDPPIVISPSVVFKGAPWGISAASEPNTYKLSYNKVLFPGQTFSFGYSVYGLEEVAFTALEA

SEQ ID NO: 130 - protein, 193 aa, synthetic construct
  REGION 1..193: note = pYY-BEM4.21; tr|U7QZM1|U7QZM1_PHOTE polypeptide sequence
MNKTRRKLLATLGIMSISMSFIAQAGEKKTQVINNILSKQEITEHEKYMREAIKEAIKNPKHPFGAVIVNRNNGEILSRGVNTGRNNPILHGEIQAINHYITQYGNQGWENVALYTTGEPCSMCMSALVWIGIREVIWATSISVIRNSGIRQIDISAHEIAERASSFYNPITLVGGILANETDKLFLERKRGN

SEQ ID NO: 131 - protein, 319 aa, synthetic construct
  REGION 1..319: note = pYY-BEM4.22; tr|A0A081CH48|A0A081CH48_PSEA2 polypeptide sequence
MASRRHLLATQVTGNHRKLSLWHLRGWLSPYTKLVDAVYFLTTNSFYHSLQTPPVQSITMLLSSIITSLALAAQASAYREGLHPEFQSGLSINSVPATDRDHWMRLANSAIYYPPVSHPCPQAPFGTAIVNTTSNELICAIANRVGSTGDPTQHGEITAIQHCTNVMRKKGLSPQEIIAAWKQLSLYTNAEPCTMCLSAIRWAGFKEVIYGTSVGTISENGRNQIYIPSNLVLEKSYSFGHATLMLGNILTHETDPFFQHQFNESAPCPVGCERTQVGEARVKTCEPVPNWQKLVRLEYSEDSRVGSEPVAHTPLHLEL

SEQ ID NO: 132 - protein, 203 aa, synthetic construct
  REGION 1..203: note = pYY-BEM4.23; tr|A0A3D3HMU1|A0A3D3HMU1_9GAMM polypeptide sequence
MDYSDAILGAITSIRRNSKQPGVNVTDNVTDSSTQYNNDEYWMRRALALAREAGEAGEIPVGAVLVKDNQQVAGGFNQPIRSHDPAAHAEILTLREAGAVLGNYRLIDTTLYVTLEPCMMCAGALVHSRIKRLVFGAAEPKTGAAGSFIDLLTLPRLNHYMEVTGGVLGEECSVLLSDFFRRRRAEKKALKRQNSESGSDSAS

SEQ ID NO: 133 - protein, 270 aa, synthetic construct
  REGION 1..270: note = pYY-BEM4.24; tr|A0A1N5WT13|A0A1N5WT13_9ACTN polypeptide sequence
MLEKIERRLVAAAEAVVRSPSTGDAHTVAAAAMDANGDIYSGVNVFHFTGGPCAELVVIGSAAAANAPPLITIVAVGDGDRGVIAPCGRCRQVMLDLHPDVFVIVPTGDGQLAAKPVRELLPFGYVARTGSTAPRVVYFHPRHYDTISSGLKTATVRFQDSVQTGPAVFVFDDGESIRRLDAVVEKVESRRLDHLTEEDAHHEALPDSDALRDAIKTQYPMLGDGDVVDVATFRLTAISAPDPDPRSSYPPAVSRCNPAGPRADLLVGQS

SEQ ID NO: 134 - protein, 257 aa, synthetic construct
  REGION 1..257: note = pYY-BEM4.25; tr|X0SAC5|X0SAC5_9ZZZZ polypeptide sequence
MTKDGRVIASAHDTEVTDQDSTAHAEINAIRKASKIYRKDLTGCLIISTHEPCPMCTGSIIWSNISKVVYGVSIRDSIKAGRDMINLSCKEIIKKPNAEINIYDGILKKECLKLYNNDTRKLVKKFRKYEWINIEENLLNKRMQWFENNKTMIRKLKGNDLEKAYHLILMKIGIKRSEAPIVKKSESKIIFHSKNYCPSLEACIILDLDTREVCKEIYERPTEELIRRLNSKLRFTRNYDCIRPYSDYCEEIIILEK

SEQ ID NO: 135 - protein, 154 aa, synthetic construct
  REGION 1..154: note = pYY-BEM4.26; tr|A0A3B8IC10|A0A3B8IC10_9BACT polypeptide sequence
MPSHEDFIHQCLELGKEALLQGNPPVGSVIVWQDQVIGRGIENGRSSGDITQHAELLALQEAVATGQRDKLKEAIIYSTHEPCVMCAYPIRQYKIPTVVYSVAVPELGGHTSSWHLLTTEDVPKWGKAPKIITGISAEEVEALNAAFQDSLKKG

SEQ ID NO: 136 - protein, 180 aa, synthetic construct
  REGION 1..180: note = pYY-BEM4.27; tr|A0A2N9P8B9|A0A2N9P8B9_9FLAO polypeptide sequence
MFIFKLISPPVSIEVYQDKIIQKLYICFMENIFTDEYFMKKALQEAETAFQQGEIPVGAVIVIDNRIIARSHNLTEMLNDVTAHAEMQAITASANFLGGKYLKDCTLYVTLEPCQMCAGALYWSQISKIVYGATDEQRGYRAMGAQLHPKTKVISGIMQNECTHLMKDFFKQRRSKSTKD

SEQ ID NO: 137 - protein, 178 aa, synthetic construct
  REGION 1..178: note = pYY-BEM4.28; tr|K1KX30|K1KX30_9BACT polypeptide sequence
MVKNPVNNNELYFGKHSEIPMNEEQKAYMKMAVDLSRSGMESGKGGPFGCVIVKDGKVIGIGSNSVLETNDPTAHAEIVAIRDACRNLGHFQLDGCEVYTSCEPCPMCLGAIYWARPSKVFFANDKRDAAEAGFDDDFIYQELELPYEKRKIPFEQGMQDTAKEVFQEWILKEDKTLY

SEQ ID NO: 138 - protein, 196 aa, synthetic construct
  REGION 1..196: note = pYY-BEM4.29; tr|R4XI84|R4XI84_TAPDE polypeptide sequence
MSSEIEPPSTDVHKHAVAEAADESGAADAFMQIALQQAETALLNKEVPVGCVFVHQPTGTVLATGANQTNASLNGTLHAEFVAIESILRDHPPSIFRESDLYVTVEPCVMCASALRQLQVRKVYFGCGNDRFGGCGSVFSIHSDASKTGDAAYMVESGIFRKEAIMLLRRFYLLQNESAPKPALKSTRVLKEHFDE

SEQ ID NO: 139 - protein, 212 aa, synthetic construct
  REGION 1..212: note = pYY-BEM4.30; tr|A0A239CVF7|A0A239CVF7_9DELT polypeptide sequence
MSPASKKHFPSLFSFLLLTIGLICGTAHAQPQGHTADDTAATLANASLKEHEPFIRRCYQLAIDAGKKGNHPFGALLVHKGKIVLEAENTVLTDNDFTNHAEMNLIAEAARTLSRQIIPEATVYTSCAPCAMCTATLAMAGFTRIVYGVSHDALNKRFGLKGKSVSCPALFKTMGMELEFVGPVLEKEGLRVFDFWPEKDPHAQMLKKQARK

SEQ ID NO: 140 - protein, 320 aa, synthetic construct
  REGION 1..320: note = pYY-BEM4.31; tr|A0A1Q3NME1|A0A1Q3NME1_9BACT polypeptide sequence
MTEFNYDWAKLAFSSKRPLTNLKATFIIAPREISEKRFTQLLKEYLPKGDILLGISKEDYVEGLEGQPQFAMLQQKTLQKLIDKVNDASAHKVYTLRYFQRELPAIIEKLTPPRVVGIHGSWHHSFHTLPIYYLLSEKRIPYQLVAAFSDEDEARAYEVATDKKIVRPTLEGSFDDTTVLQLTDEVAKSSYDYGFQTGAILAEKVNGVYQPVAAGFNKVVPYQTYALLNGASRETNFSPANDMNHYDTIHAEMQILVEAAKQGISLKDKTLFVNLMPCPSCARTLSQTELSEIVYRIDHSGGYAVDLLTKVGKDIRRIVY

SEQ ID NO: 141 - protein, 180 aa, synthetic construct
  REGION 1..180: note = pYY-BEM4.32; tr|A0A2G6N4N7|A0A2G6N4N7_9DELT polypeptide sequence
MKERTVSYSDRHFMAEALEMAESALTQGEFPVGCVIADGTAVVARGHRTGTTAGAVNEIDHAEINALRHLGLAGEHLDRTDLTIYSTMEPCLMCFAAIVLSGINRIVYAYEDVMGGGTGCDLTGLPPLYRDAPLTLVAGVRRRASLNLFRRFFTDPENGYWAGSLLSRYTLNQTKDSHRL

SEQ ID NO: 142 - protein, 156 aa, synthetic construct
  REGION 1..156: note = pYY-BEM4.33; tr|A0A0G0RBB8|A0A0G0RBB8_9BACT polypeptide sequence
MQSVQYNKLTHLQRRALDEAEQVLENSYNPYSHFYVGACLISEDEQLIAGTNFENAAYGSAICAERAAVLRANAMSIRRFRGIAIIARGEDFNTTEVTGPCGSCRQVLYEISQVSGCDLQVILATSKKDKIVITTIRELLPLAFGPLDLGVDIGKY

SEQ ID NO: 143 - protein, 217 aa, synthetic construct
  REGION 1..217: note = pYY-BEM4.34; tr|A0A327L2Q5|A0A327L2Q5_9RHIZ polypeptide sequence
MVTSRDGEDEAMMARCVALSRIAVGKGEYPFGAVVAREGRIVAEAINRTIRDGDVSRHAEVIALARAQKAIGRRELRECSLYSNVEPCAMCSYCIREAWVGRVVYALGSPVMGGVSKWNILRDDGLSGRMPQVFDAAPEVVSGVLVEQAQAAWRDWSPLAWEMITLRGLMTDPSARPECRTRAARPRSLWHHLVALIERPPRPYVDPTSAAEGHADL

SEQ ID NO: 144 - protein, 162 aa, synthetic construct
  REGION 1..162: note = pYY-BEM4.35; tr|S2DR30|S2DR30_9BACT polypeptide sequence
MKMKKKIEITVSLEVIQKSEWSKEDRSLIERAIHAVEHAHAPYSNFMVGTALLLDNGQIFSANNQENVSFPVGICAERAVLSYAMGNFPNNRPVKLAVVAKRRSDSTWATVTPCGLCRQTINEYEVKFGHPIEILMLNPGEEILKASGIDQLLPFRFNDLNS

SEQ ID NO: 145 - protein, 153 aa, synthetic construct
  REGION 1..153: note = pYY-BEM4.36; tr|A0A369QGF1|A0A369QGF1_9BACT polypeptide sequence
MEEHEKWMHWCLNLAQQALQQGDFPVGAVVVQKGKLIGQGVEAGQLKKDITCHAEMEAIRDARQTINTADLQNCILYSTHEPCIMCSYVIRHHKISRVVVGTTVPEVGGSSSAYPLLSAPDISIWVAPPHLVTGVLAEACQALSQAYKQKFKK

SEQ ID NO: 146 - protein, 159 aa, synthetic construct
  REGION 1..159: note = pYY-BEM4.37; tr|A0A1W6X4U4|A0A1W6X4U4_9RHIZ polypeptide sequence
MTNPSRQERWDRRFLELAKVFGTWSKDRSAGTGCVIVGPDRLLRASGYNGFARGIDDEVPERHERPAKYSWTEHAERNAIYNAAKLGISLDGCTAYVNWFPCIDCARAIVQAGIVRLVGLHPDHADQRWGSEFKFATEMLRESGIEIILYDIPELAARK

SEQ ID NO: 147 - protein, 490 aa, synthetic construct
  REGION 1..490: note = pYY-BEM4.38; tr|A0A238BW09|A0A238BW09_9BILA polypeptide sequence
MEEMARKIRTKAKKANSYCNTMTFLISKASIVLLKAECKRIELTVVIFRFLIKMNASEPNNELCDMTVIKSMLKITHVIFDLDGLLIDTEVVFSKVNQCLLSKYNKKFTPHLRGLVTGMPKKAAVTYILEHEKLSAKVDVDEYCKKYDEMAEEMLPKCSLMPGVMKLVRHLKTHSIPMAICTGATKKEFEIKTRYHKELLDLISLRVLSGDDPAVKRGKPAPDPFLVTMDRFKQKPEKAENVLVFEDAANGVCAAIAAGMNVIMVPDLTYMKIPEGLQNKINSFSDNLIISNDLNVALMSLKKELSEEEVHFLNRAFEIAVDAVLNNEVPVGCVFVFEGQEVAFGRNDVNRTKNPTYHAEMVALKMMKQWCMDNGRDLEEIMRRTTLYVTLEPCIMCASALYHLRLKKILYGAANERFGGLVSVGTREKYGAKHFIEIMPNLSVDRAVKLLKEFYEKQNPFCPEEKRKVKKPKKSGNNNDNSDDAVALNV

SEQ ID NO: 148 - protein, 159 aa, synthetic construct
  REGION 1..159: note = pYY-BEM4.39; tr|A0A1J5H6Z0|A0A1J5H6Z0_9BACT polypeptide sequence
MAYQPSEKFMQMAIDKTREGVLSGQTPFGACIVKDGKVVACEHNTVWQDTDITSHGEVHTIRAACKAIGSIDLSGCILYSTCEPCPMCFSAIHWARIDTVVYGAFIADAQDAGFNELTISNEKMKEFGGSPVNFISGFMRDENVALFKLWKEQGANNVY

SEQ ID NO: 149 - protein, 168 aa, synthetic construct
  REGION 1..168: note = pYY-BEM4.40; tr|A0A3C2D945|A0A3C2D945_9BACT polypeptide sequence
MKTTEIRIIVHEYQNIDELTENDQYLLHEARRITEFAYAPYSGFHVGAAILLGNGMIVKGNNQENSAYPSGLCAERVALFYANANYPDSEVKTIAISAAKNGILVNDPIKPCGGCRQTLSEAEVRFGSPIRIILDGQDSILVLHGVESLLPLSFSKKDLASPLAATGR

SEQ ID NO: 150 - protein, 214 aa, synthetic construct
  REGION 1..214: note = pYY-BEM4.41; tr|A0A1I7EYS3|A0A1I7EYS3_9BURK polypeptide sequence
MKFKLDPSRPPDEDDYYLGVALAVRRKANCTGNRVAAVIVKNKRVIATGYNGVPEDMPNCLDGGCLRCSNPGGQFKSGTRYDLCICVHAEQNALLTAARFGISVEGAHLYTTMQPCFGCAKEILQAKIEKVFYLHPWVPTDVDPVMDAAMKAEYAKIIGKLKVKKLDFDDPVATWAVTTMRQAALASDKNPDKKTPPKTAKKKVAKKKSRTSPR

SEQ ID NO: 151 - protein, 155 aa, synthetic construct
  REGION 1..155: note = pYY-BEM4.42; tr|H8GQX8|H8GQX8_METAL polypeptide sequence
MNHEHFMRRAIELARQAPQYPFGAVIVRRDDGQCVGQGFNRSDLNPTYHGEMVAINDCAVRHCAEDWRGFDLYTTAEPCAMCQGAIEWAGIGRVFYGTSIPYLQKLGWWQIDLRAAEVSARAVFRDTLIVGGILETECNALFAAARRGCFGTGSE

SEQ ID NO: 152 - protein, 156 aa, synthetic construct
  REGION 1..156: note = pYY-BEM4.43; tr|A0A0S8HZN3|A0A0S8HZN3_9CHLR polypeptide sequence
MDEHDIRFLRASFDVARNARKNGNHPFGALLVDEHGRIVMEAENTVITAKDCTGHAETNLMREASSKYDSDFLANCTIYTSTEPCPMCAGAIFWSNVRRVVYGLSEESLYEIAGRGSEEVLFLSCREIFERGKKLIEVIGPLLEDEAREVHMGFWR

SEQ ID NO: 153 - protein, 193 aa, synthetic construct
  REGION 1..193: note = pYY-BEM4.44; tr|E3SF31|E3SF31_9CAUD polypeptide sequence
MKPTTVLQIAYLVSQESKCCSWKVGAVIEKNGRIISTGYNGSPAGGVNCCEHAEEQGWLLNKPKPVLIPGHKSECVRFSQVDRFVLAKAHREAHSAWSKNNEIHAELNAILFAARMGSSIEGATMYVTLSPCPDCAKAISQSGIKKLVYCETYDKNIPGWDDILKNAGIEVFNVPKRSLDKLNWENINEFCGE

SEQ ID NO: 154 - protein, 330 aa, synthetic construct
  REGION 1..330: note = pYY-BEM4.45; tr|F8AAC6|F8AAC6_THEID polypeptide sequence
MIRAPWHEYFMLLAKIVALRSGCNSRPSGAVIVKNKRILATGYNGPMPGAWHCTDRGPGYCFRREKGIPDIDKYNFCRATHAEANAIAQAARFGISVEGASLYCTLAPCYVCLKLIASAGIKKVYYEHDYGSRDFERDQFWKEAIKEAGLEKFEQITVSQEVMEQLQEILPYPTSKRRLAPTEFLDEFEDGKKYGVPSIEVLFNKLNYLTRQALKDITFVIEKTTVTEEPEGISFYLSGKMVELSELINTVKKQINADQNFYFLAKHNAIEAKIEILREAENIRLKAFLNECPLESFKRIAESLDYILYQVSNSLSLPTRLELSVNLLRI

SEQ ID NO: 155 - protein, 158 aa, synthetic construct
  REGION 1..158: note = pYY-BEM4.46; tr|A0A2H4ZNK4|A0A2H4ZNK4_9EUKA polypeptide sequence
MKKQLSRKIQEEWMSRLLRNAYDAGTYGEVPIAAVILNESGQCIGWGRNCREKDQNPLGHAEIIALRQASYLKKSWRFNECTMLVTLEPCPMCAGALLQARINHIIYGASDYKRGGFGGVLDLSKNSSAHHKIEITRGVKSIQSCQLLETWFRRRRRV

SEQ ID NO: 156 - protein, 176 aa, synthetic construct
  REGION 1..176: note = pYY-BEM4.47; tr|A0A239N5N1|A0A239N5N1_9PSED polypeptide sequence
MEGRAGIIPFDEGGAAMGPAEEDSPMQHLAYMREALALARANVEAGGRPFGAVLVRDGEVIARAANGTHLDHDPTAHAELLALRAAGRALGSPRLDGCVVYASGHPCPMCLAAMHLSGVSAAYYAYSNADGEPYGLSTAAVYAQMAQPVEWQSLPLQALRPEDEEGLYGFWRERRP

SEQ ID NO: 157 - protein, 199 aa, synthetic construct
  REGION 1..199: note = pYY-BEM4.48; tr|A0A328VTR2|A0A328VTR2_9PSED polypeptide sequence
MHPEHLALLQQAPASTHADDTWARLCCEQALLAVEEGCYAVGALLVDGAGELLCSGRNQVFAPAYASAAHAEMRVLDQLEAEHAQVDRRSLTLYVSLEPCLMCYGRILLAGITRVRYLARDRDGGFALRHGRLPPAWANLASGLSVVQAKADPYWLDLAEHAIGRLQDRQTLRQRVIRAWRGQRTLTDEFSSTKRTHSG

SEQ ID NO: 158 - protein, 402 aa, synthetic construct
  REGION 1..402: note = pYY-BEM4.49; tr|A0A103YG48|A0A103YG48_CYNCS polypeptide sequence
YIRELHASSLRRDEHEIQNPKILVIVDRLSSPSLHVSLSLSLSLVIFPPFIPLNQTPTHMENAKVVEAKDGTIAVASAFSGHQEVVQDRDHKFLTRAVEEAYKGVECGDGGPFGAVVVHKDEVVASCHNMVLKHTDPTAHAEVTAIREACKKLNKIELSDCEIYASCEPCPMCFGAIHLSRIKRLIYGAKAEAAIAIGFDDFIADALRGTGFYQKAHLEIKQADGNGAMIAEQVFEKTKAKFAIDHKFLTRAVEEAYKGVECGDGRPFGALVVHKDEVVVSCHNMVLNYTDPTAHAEITAIREACKKLNRIELSDCEMYSSCEPCPMCFGAIQISRIKRLVYGAKAEASIASGIPIGDFISDALKGTGFHEKANFEIKQADGNGAMIAEQVFERTKAMFPKR

SEQ ID NO: 159 - protein, 195 aa, synthetic construct
  REGION 1..195: note = pYY-BEM4.50; tr|W5M1M8|W5M1M8_LEPOC polypeptide sequence
NSSTRESRVMAQMEINGGASPPKKPGKGQSAADQDMITGLINKALQAKEFAYCPYSNFRVGAALMTNDGRVFTGCNVENACYNLGVCAERTAILKAVSEGYESFRAIAVSSDLQDQFISPCGACRQVMREFGTGWDVFLTKVDGSYVRMTVDELLPMSFGPDDLKKKKVFSLQNGHEVSTQFYTHSPCEAGENNN

SEQ ID NO: 160 - protein, 134 aa, synthetic construct
  REGION 1..134: note = pYY-BEM4.51; tr|A0A3N5YPZ2|A0A3N5YPZ2_9ALTE polypeptide sequence
MSNSETEHIQALVDAAQAAQKQSYSPYSSFQVGAAIFADDGNTYSGCNIENVAYPLGQCAEATAIGMMIMQGAKRIEDIMIASPNDQVCPPCGGCRQKISEFGTAETKIHMVTRSGEVSTVTLGELLPLAFDSL

SEQ ID NO: 161 - protein, 162 aa, synthetic construct
  REGION 1..162: note = pYY-BEM4.52; tr|A0A2A9NC86|A0A2A9NC86_9AGAR polypeptide sequence
MTNSTLSNEDRTRLIQGAFQARKKTYSPYSNFPVGAALLTTDGRIIEGANIENASYGGTICAERTAIVKAVSDGYRHFAGIAVTTKMPTRVSPCGICRQVLREFCSLDMPVLLVPGDYPQRNPVDDDGADKPGVITEGGVRETTLGALLPDSFGPENLPPRA

SEQ ID NO: 162 - protein, 163 aa, synthetic construct
  REGION 1..163: note = pYY-BEM4.53; tr|A0A2D6RD43|A0A2D6RD43_9GAMM polypeptide sequence
MNIENLITENDETLIRRCIELAGESVKNGDKPFGALLAKDGNIIFESSNNAKTKVPYHAEILTLMDAQDKLNTTDLSDYALYSNCEPCPMCSFMIREYKLDKVVFSVHSPYMGGQSRWNILEDDVLTRFKPYFSKPPNVVGGVLESEGKRIFDKVGLWMFGKE

SEQ ID NO: 163 - protein, 204 aa, synthetic construct
  REGION 1..204: note = pYY-BEM4.54; tr|A0A0H3AVL6|A0A0H3AVL6_BRUO2 polypeptide sequence
MHAKGYSQQERRIIPFANRFRFRELCSNKSLHGLRAKFPEQYTKWDPMRKAASITKANSATPMDIALEEAHAAGERGEVPIGAVIVRDGEIIARAGNRTREFNDVTAHAEILTIRQAGEMLGSERLIDCDLYVTLEPCAMCAAAISFARIRRLYYGASDPKGGGIEHGGRFYTQPTCHHAPEIYPGFCEADARKILKDFFREKR

SEQ ID NO: 164 - protein, 165 aa, synthetic construct
  REGION 1..165: note = pYY-BEM4.55; tr|A0A242H531|A0A242H531_9ENTE polypeptide sequence
MFIVKNNIEVIQQQAELDAKFMKQALKLAKDASNNGNEPFGAVLVKNDKVILTGENQIHTESDPTYHAELGIIRDFCTSQKITDLSEYTLYTSCEPCCMCAGAMVWSNLDRMVYGLGHDELAEIAGFNIMIGSEEIFSKSPNRPEVAKGVLKEAAVPVYVDYFQR

SEQ ID NO: 165 - protein, 181 aa, synthetic construct
  REGION 1..181: note = pYY-BEM4.56; tr|A0A2R6XZE2|A0A2R6XZE2_9BACL polypeptide sequence
MSGRISWHEYFMAQAKLIALRATCTRLMVGAVIVRDRRVIAGGYNGSIAGDEHCIDVGCKVRDGHCIRTIHAEQNALMQCAKFGVSTDGAELYVTHFPCLNCTKLLIQAGIRHIYYEVPYRVDPYAIELLEKAGVGTTQITVDLNAYVQVMSKVSTDPALTYVPESKAQKDEYGQSVGKIV

SEQ ID NO: 166 - protein, 173 aa, synthetic construct
  REGION 1..173: note = pYY-BEM4.57; tr|A0A139SHT6|A0A139SHT6_9BACT polypeptide sequence
MSEANASSESLPSRNSPVELIAEAAGKFGRRPTWDEYFMATAVLISTRSSCERLNVGCVIVTAGESHKNRIVAAGYNGHLPGSPHTSRMRDGHEQATVHAEQNAISDAARRGSSVEGCTAYVTHYPCINCAKILASAGIAKICYRLDYHNDPLVKPMLAEAGIEIVQLGEAAS

SEQ ID NO: 167 - protein, 170 aa, synthetic construct
  REGION 1..170: note = pYY-BEM4.58; tr|A0A261DBH2|A0A261DBH2_9RICK polypeptide sequence
MVMKKKLITVKRSTEFNNFFMEEALKQAQFALDKNEIPVGAIIVNRITNKVIAKAHNIVEQTKNPVLHAEIVAINQSCQILSSKNLSDCDMYVTLEPCVMCSGAISFARIGRLFYAANDPKQGAIENGGRFFNSKSCFYRPEIYSGFSAKISENLIKEFFYNVRYQKCNP

SEQ ID NO: 168 - protein, 146 aa, synthetic construct
  REGION 1..146: note = pYY-BEM4.59; tr|A0A2N0XZK6|A0A2N0XZK6_9VIBR polypeptide sequence
MTDNSLHESYMRQAFELSKSALPGCRPNPPVGCVFVKDGEVVSSGFSQPPGNHHAEAGAIAAYTGSYDGLVAYVTLEPCSFQGRTPSCAKALVRVRPEKVYVAILDPDTRNSGAGIKILEDAGIDVEVGLLGEEVASFLNPYLIRN

SEQ ID NO: 169 - protein, 159 aa, synthetic construct
  REGION 1..159: note = pYY-BEM4.60; tr|A0A1V5R0F9|A0A1V5R0F9_9BACT polypeptide sequence
MTKKETTKLHALDDFCMKKALLLAKRAFRADEVPVGALVVDSSNKVIGRGYNQVEKRKSQRAHAEQLAIEQACKKIGDWRLEGCTLYVTLEPCTMCMGLIKLSRIERVVFGAASPLFGYQLDKNRKSQLYKKGVIKIRKGVGKATAAALLKDFFKNKRM

SEQ ID NO: 170 - protein, 167 aa, synthetic construct
  REGION 1..167: note = pYY-BEM4.61; tr|A0A2W0H8Y3|A0A2W0H8Y3_9BACI polypeptide sequence
MKNNGRLDHEYFMTEALQEAKEAGQRGDLPIGAVIVHNGRIIARGSNMRKTAGIKISHAENNAMHNCAPYLMKHASECVIYTTLEPCIMCLTTLVMANIDSIVFAADDKYMNMKPFIDANSYIRDRIHQYKGGVCRGESEALLRKYSPYAAELALNGTHPHHRKGGA

SEQ ID NO: 171 - protein, 165 aa, synthetic construct
  REGION 1..165: note = pYY-BEM4.62; tr|A0A261BDB7|A0A261BDB7_CAERE polypeptide sequence
LYKLYIFRMTTTKANLTQFEQELVDKAVGAMEKAYCKYSGFKVGAALVCEDGEIIIGANHENASYGATICAERSAMVTALTKGHRKFKLLAVATELEAPCSPCGICRQYLIEFGDYKVILGSSTSDQIIETTTYGLLPYAFTPKSLDDHEKEAEERNHQEGEKKH

SEQ ID NO: 172 - protein, 162 aa, synthetic construct
  REGION 1..162: note = pYY-BEM4.63; tr|A0A2E1PHI6|A0A2E1PHI6_9GAMM polypeptide sequence
MKELLIHSWLMLNSNSKLIMERVIELSEINLKNGKIPIAAVIVDKKNYEIISESQNEDSPIGHAELLAITKALKKLNTNRLDSTNLFVTIEPCPMCAYAISKCHINRLYFGSEDEKGGGVINGPRIFESHNLKKIDYVSHCYHEKTTQLMQSFFQLKRNQQL

SEQ ID NO: 173 - protein, 133 aa, synthetic construct
  REGION 1..133: note = pYY-BEM4.64; tr|A0A378LUA7|A0A378LUA7_9GAMM polypeptide sequence
MDTIIKKMISNAHNTLAHSYSPYSKFSVASCICTDKDNFYTGVNVENSAYGLAICAETSAISAMVTAGEKRIKSMVVMAGTNILCSPCGACRQRIYEFSTPDTLIHLCDKNSILRTFKINELLPEAFKFDFNP

SEQ ID NO: 174 - protein, 370 aa, synthetic construct
  REGION 1..370: note = pYY-BEM4.65; tr|A0A139HQ78|A0A139HQ78_9PEZI polypeptide sequence
MADSLKSKPGHARHDTALIHGLSQSDVQKLSESCVDAKSKAYCPYSHFRVGCAVLLANGDVVQGANVENAAYPVGTCAERVALGTAVGAKKGDFRALAVSTDISPPASPCGMCRQFIREFCELNTPILMYDKDGKSVVMTLEQLLPMSFGPDKLLPPGQLENGLMQTQTQSSFVTRAFSTTSSRRQDDTPQVPQSHYDFFPQTFPQGPPPKTSFSPDLKQLRKEFLQLQAKAHPDLAPQDQKRRAEALSMRINEAYKTLQSPLRRAQYLLSQQGIDVEDETAKLDDSSLLMEVMEAREAVEEVEDEEQLNEIRAENNGRIEESVRVLEDAFRDNEFEKAAQEAIRLRYWVNIEESIQGWEKGNGGGILHH

SEQ ID NO: 175 - protein, 165 aa, synthetic construct
  REGION 1..165: note = pYY-BEM4.66; tr|A0A2A9FXV0|A0A2A9FXV0_9VIBR polypeptide sequence
MCNLKENKDMDKYFHFACDATIEGMREGTGGPFGATLTRNGEVVCSVANTVLKDMDISGHAEMVAVREACKKLDTLDLSDCVMYATCEPCPMCVSVMLWAGIKTCYYASTHLDAAKHGFSDQQLRDYLDGSDTSTLNMVHIEDNRDDCAKIWTEFRHLNETKNDG

SEQ ID NO: 176 - protein, 509 aa, synthetic construct
  REGION 1..509: note = pYY-BEM4.67; tr|A0A1A8AG96|A0A1A8AG96_NOTFU polypeptide sequence
MEHSDRWSRAEPGLSTSSRETRDGSTQTDCKLQGHGPRLSKVNLFTLLSLWMELFPQEQDEENGQSQIRRSGLVVVREGKVVGLHCSGADLHAGQAAILQHGASLANCQLFFSRRPCATCLKMIINAGVRQITFWPGDPEISMLTSNQTHSQRTSQSITEASLDATAVEKLKSNSRPQICVLMQPLAPGVLQFVDETSRRSDFMERMMDDDPELDSEKLFNSDRLRHLKDFCRHFLIQTDQRHKDILSQMGLKNFCVEPYFSNLRSNMTELVEVLAAVAAGMPQQHYGFYREESLSLDPHPVDVSQAVARHCIVQARLLSYRTEDPKVGVGAVIWAKGQSACCCGTGRLYLIGCGYNAYPAGSKYAEYPQMDNKQEDRERRKYRYIVHAEQNALTFRTRDIKPDECSMLFVTKCPCDECIPLIRGAGVKHIYTSDQDRDKDKGDISYLRFGSLKGVCKFIWQRSPPVSSASSLHLTNGCVGKHVRQAEQQIYKNKKLCTKGSSGSSDIC

SEQ ID NO: 177 - protein, 148 aa, synthetic construct
  REGION 1..148: note = pYY-BEM4.68; tr|A0A3E2VN88|A0A3E2VN88_9FIRM polypeptide sequence
MEKEITNMDKQKLIQMAVDGLGRSYAPYSHFHVSAALLCADGTVYTGNNIENAAYTPSVCAERCAIFKAVGDGRREFEAIAVCGGPDGVIEDYCPPCGVCRQVMREFCDPSSFRVLVAKTAEDYREYTLEQLLPDGFGPDHLTGSGER

SEQ ID NO: 178 - protein, 221 aa, synthetic construct
  REGION 1..221: note = pYY-BEM4.69; tr|A0A2D5ZRJ2|A0A2D5ZRJ2_9BACT polypeptide sequence
MARPVHLHTGERRTEEGATESRAVAAVATAITRAPRAPPRPATGRERDGPPPRRVFGGGLRVGDPSGYDRGESKPIGGPLTEKRSDWHSYFMRIAGEVATRATCDRKHVGAVIVRNRTILSTGYNGSIRGMPHCDDVGHDMVDGHCIATIHAEANAILQAARNGVMIQDGSIYITASPCWNCFKLVANAGLKRVYYGEFYRDKRSFEVARRLGIDLMHIEV

SEQ ID NO: 179 - protein, 155 aa, synthetic construct
  REGION 1..155: note = pYY-BEM4.70; tr|A0A1B8WPS3|A0A1B8WPS3_9BACI polypeptide sequence
MEGVQLIYQFQWGNLIMTVNKEDLYLIDVARNTIKTLYVDGKHHVGAAVRTKTGKIYSAVHLEANIGRVSVCAEAIALGKAISEGESEFDTIVAVRHPDPTQENQKIEVVSPCGICRELISDYGKGTNVILKNKEGYIKTVISDLLPNKYIREDN

SEQ ID NO: 180 - protein, 156 aa, synthetic construct
  REGION 1..156: note = pYY-BEM4.71; tr|A0A1W5ZQK9|A0A1W5ZQK9_9BACI polypeptide sequence
MNRFMERAVSLAAENVRVGGQPFGAVLVKDDELVAEGVNEMHLNYDVSGHAELLAIRRAQGELQTHDLSGYTMYASGEPCPMCLSAMYFAGIKDVFYCATVEEAAQVGLEKSKNVYDDLQKSKGERSLVMKQMPLEDDQEDPMKLWDERTNHNGTS

SEQ ID NO: 181 - protein, 340 aa, synthetic construct
  REGION 1..340: note = pYY-BEM4.72; tr|A0A378V0W4|A0A378V0W4_MYCFO polypeptide sequence
MVHAQFDPTARQALAATAVEAKTRKDLTWQQIADAAELSPAFVTAAVLGQHALPARSAEAVAALLGLDDDAALLLQTIPIRGSIPGGIPTDPTIYRFYEMLQVYGTTLKALVHEQFGDGIISAINFKLDVRKVADPEGGERAVITLDGKYLPPNPFDRVRYRGGLMDFAQRTIDIARQNVAEGGRPFATVIVKNGEILAESPNLVAQTHDPTAHAEILAIRKACTRIGTEHLIGATIYVLAQPCPMCLGSLYYCSPDEVVFLTTRDAYEPHYVDDRKYFELNMFYDEFAKPWDQRRLPMRYEPRDAAVDVYKLWQERNGGERRVPGAPTSTRPGKNPRGE

SEQ ID NO: 182 - protein, 157 aa, synthetic construct
  REGION 1..157: note = pYY-BEM4.73; tr|I3XF03|I3XF03_RHIFR polypeptide sequence
MKQRCMSPKSAQRFWDNDMHNNKDRPMSENELFVAAREAMAKAHAPYSKFPVGAAIRAEDGQIYTGANIENLSFPEGWCAETTAISHMVMAGQRKIMEVAVIAEKLALCPPCGGCRQRLAEFSGASTRIYLCDETGIKKSLALSDLLPHSFETEILG

SEQ ID NO: 183 - protein, 595 aa, synthetic construct
  REGION 1..595: note = pYY-BEM4.74; tr|F8IEF3|F8IEF3_ALIAT polypeptide sequence
MDAKELETRGWLCMRAVDVIDKKRRGEALAEEELRFLIEGYVAGRIPDYQMSAFLMAVVWRGMTREETLVLTRLLADSGERLDLSGIPGVKVDKHSTGGVGDKATLVVLPLVASIGVPVIKMSGRGLGHTGGTIDKLESIPGFRTDLSVAELVAQVRQVGIALGGQTADLAPADKKLYALRDVTGTVESLPLIASSVMSKKLAGGADAIVLDVKVGDGAFMKSRSDARRLARLMVEIGEAAGRRTVAVLSNMDQPLGCAIGNALEVAEAIRVLSGEGPFDLAEIALALAEEMTVLAGVAATREEARRMLRQSVAEGRALETLRRWIAAQGGDPAVVDDPSRLPQAPVQMPYLPKKAGFVAKLSALAFGLAAMRLGAGRETKEEAIDPSVGIVLHAKVGDRVQTHRPMFTVHARTGEDALRCIQELEAAIQISDDPVEAPPLILARIDRSEALPYADLMDAAREARDRAYVPYSGFAVGAALELADGRMVTGANVENASYGLTNCAERSAVFRAVAEGGPGTKPEIRAVAVIADSPEPVSPCGACRQVLAEFCSPDTPVYLGNLQGDVRETTVGALLPGAFTDAQMANVRRQDKEA

SEQ ID NO: 184 - protein, 153 aa, synthetic construct
  REGION 1..153: note = pYY-BEM4.75; tr|A0A1G3M638|A0A1G3M638_9SPIR polypeptide sequence
MKTTNINALDKWDLRFLQMAEHVAEWSKDPSTKVGAVIVRPDRTIASVGFNGFARGVRDTVERLWNRELKYPLTVHAELNAILSAHEPVRGHSLYVSPLSPCSNCAGVIIQSGIARVVAKCGQVNNPAQWSESFNLALTAFAEAGVSVILVEH

SEQ ID NO: 185 - protein, 177 aa, synthetic construct
  REGION 1..177: note = pYY-BEM4.76; tr|A0A3D9LFR2|A0A3D9LFR2_9MICC polypeptide sequence
MEQNDHGSSGAFSDPFEDDIPLTASLPRITGTGSGIDWQRLESTARAAMTRAYVPYSRFPVGAAALVEDGRVVAGCNIENASLGLTLCAECSLVSNLQMSGGGRIVAFYCVDGNGEVLMPCGRCRQLLYEFHAPGMRLMGPDGELTMDEVLPLAFGPADMTHLSDSAASTDDPGRTR

SEQ ID NO: 186 - protein, 172 aa, synthetic construct
  REGION 1..172: note = pYY-BEM4.77; tr|A0A3B9YGB5|A0A3B9YGB5_9BACT polypeptide sequence
MAKPISKKYRKLIETAKAARKKAYSPYSRYQVGAAVLTESGRIYSGANMENASYGLCMCAERVAIANAVTRGEKVLQAVCVVGKKARPCGACRQVMLEFSTKETELLMVDIDPNARRDTVIRTRVYSMLPNPFDPFESGMLPQHPQNLLRRRKSPQPRRKRRSRPVHREVSR

SEQ ID NO: 187 - protein, 391 aa, synthetic construct
  REGION 1..391: note = pYY-BEM4.78; tr|A0A182F569|A0A182F569_ANOAL polypeptide sequence
MPRPSQFRVSSSQSLSNSQIQASQSSDSVVDITSYVNAVVKALLNLSCTKTIIKRADLVNIALKGNGRLIGRVLQDANIELKEIYGYELIEVEKSKTMILCSTLAAGSMDELNDANRRRYTFLYLILGYIFMKNGSVPETIVWEFLETLGIEEQQEHNYFGDVRKLYDSLFKQAYLTRTKQALEGLNDDVMLISWGVRSKHEVSKKDILAGFCKVMNRDPVDFKAQYIEANEKDDKMNNNINGTVDGRNTVEYSSLDASVKELIEAAIKVRNNAYCPYSNFAVGAALRTVGGDIVTGCNVENGTFGPSVCAERTAVCKAVSEGHREFTAVAVVAFQETEFTAPCGTCRQTLSEFSRKDIPIYLVKPSPVRVMVTSLFQLLPHAFSPSFLNK

SEQ ID NO: 188 - protein, 151 aa, synthetic construct
  REGION 1..151: note = pYY-BEM4.79; tr|A0A264Z0D4|A0A264Z0D4_9BACI polypeptide sequence
MEPKKLIEEAIVASKQAYVQYSNFHVGAALLTKDGKLYHGCNIENASYGLTNCAERTAIFKAVSEGEKEFQAIAVVGDTEGPISPCGACRQVLAEFFSPDTVVILANLKGDHVVTNINELLPGFFSSKDLQKKVKNCFEKNALGSSCLRPI

SEQ ID NO: 189 - protein, 229 aa, synthetic construct
  REGION 1..229: note = pYY-BEM4.80; tr|A0A1L9Q1R3|A0A1L9Q1R3_ASPVE polypeptide sequence
MPLSAEEAALVETATATINSIPLSEDYSVASAAKASDGRVFTGVNVYHFTGGPCAELVVLGVAAAAGAAQLTHIVAVANEQRGILSPCGRCRQVLLDLQPNIQVIVGKEGSEQSVPVAQLLPFSYRQPDQHTPVIFKALTSSGPVVVDFFATWCGPCKAVAPVVGKLSETYTDVRFIQVDVDKARSISQEHDIRAMPTFVLYKDGKLLDKRVVGGNMKELEEQIKAIIA

SEQ ID NO: 190 - protein, 18 aa, synthetic construct
  REGION 1..18: note = synthetic peptide
KRTADGSEFESPKKKRKV

SEQ ID NO: 191 - protein, 16 aa, synthetic construct
  REGION 1..16: note = synthetic peptide
KRPAATKKAGQAKKKK

SEQ ID NO: 192 - protein, 17 aa, synthetic construct
  REGION 1..17: note = synthetic peptide
KKTELQTTNAENKTKKL

SEQ ID NO: 193 - protein, 19 aa, synthetic construct
  REGION 1..19: note = synthetic peptide
KRGINDRNFWRGENGRKTR

SEQ ID NO: 194 - protein, 16 aa, synthetic construct
  REGION 1..16: note = synthetic peptide
RKSGKIAAIVVKRPRK

SEQ ID NO: 195 - protein, 7 aa, synthetic construct
  REGION 1..7: note = synthetic peptide
PKKKRKV

SEQ ID NO: 196 - protein, 30 aa, synthetic construct
  REGION 1..30: note = synthetic polypeptide
MDSLLMNRRKFLYQFKNVRWAKGRRETYLC

SEQ ID NO: 197 - protein, 1368 aa, Streptococcus pyogenes [sequence omitted]

SEQ ID NO: 198 - DNA, 4104 bp, Streptococcus pyogenes
  misc_feature 1..4104: note = wild type spCas9 polynucleotide sequence
  source 1..4104: mol_type = genomic DNA
atggataagaaatactcaataggcttagatatcggcacaaatagcgtcggatgggcggtgatcactgatgattataaggttccgtctaaaaagttcaaggttctgggaaatacagaccgccacagtatcaaaaaaaatcttataggggctcttttatttggcagtggagagacagcggaagcgactcgtctcaaacggacagctcgtagaaggtatacacgtcggaagaatcgtatttgttatctacaggagattttttcaaatgagatggcgaaagtagatgatagtttctttcatcgacttgaagagtcttttttggtggaagaagacaagaagcatgaacgtcatcctatttttggaaatatagtagatgaagttgcttatcatgagaaatatccaactatctatcatctgcgaaaaaaattggcagattctactgataaagcggatttgcgcttaatctatttggccttagcgcatatgattaagtttcgtggtcattttttgattgagggagatttaaatcctgataatagtgatgtggacaaactatttatccagttggtacaaatctacaatcaattatttgaagaaaaccctattaacgcaagtagagtagatgctaaagcgattctttctgcacgattgagtaaatcaagacgattagaaaatctcattgctcagctccccggtgagaagagaaatggcttgtttgggaatctcattgctttgtcattgggattgacccctaattttaaatcaaattttgatttggcagaagatgctaaattacagctttcaaaagatacttacgatgatgatttagataatttattggcgcaaattggagatcaatatgctgatttgtttttggcagctaagaatttatcagatgctattttactttcagatatcctaagagtaaatagtgaaataactaaggctcccctatcagcttcaatgattaagcgctacgatgaacatcatcaagacttgactcttttaaaagctttagttcgacaacaacttccagaaaagtataaagaaatcttttttgatcaatcaaaaaacggatatgcaggttatattgatgggggagctagccaagaagaattttataaatttatcaaaccaattttagaaaaaatggatggtactgaggaattattggtgaaactaaatcgtgaagatttgctgcgcaagcaacggacctttgacaacggctctattccccatcaaattcacttgggtgagctgcatgctattttgagaagacaagaagacttttatccatttttaaaagacaatcgtgagaagattgaaaaaatcttgacttttcgaattccttattatgttggtccattggcgcgtggcaatagtcgttttgcatggatgactcggaagtctgaagaaacaattaccccatggaattttgaagaagttgtcgataaaggtgcttcagctcaatcatttattgaacgcatgacaaactttgataaaaatcttccaaatgaaaaagtactaccaaaacatagtttgctttatgagtattttacggtttataacgaattgacaaaggtcaaatatgttactgagggaatgcgaaaaccagcatttctttcaggtgaacagaagaaagccattgttgatttactcttcaaaacaaatcgaaaagtaaccgttaagcaattaaaagaagattatttcaaaaaaatagaatgttttgatagtgttgaaatttcaggagttgaagatagatttaatgcttcattaggcgcctaccatgatttgctaaaaattattaaagataaagattttttggataatgaagaaaatgaagatatcttagaggatattgttttaacattgaccttatttgaagatagggggatgattgaggaaagacttaaaacatatgctcacctctttgatgataaggtgatgaaacagcttaaacgtcgccgttatactggttggggacgtttgtctcgaaaattgattaatggtattagggataagcaatctggcaaaacaatattagattttttgaaatcagatggttttgccaatcgcaattttatgcagctgatccatgatgatagtttgacatttaaagaagatattcaaaaagcacaggtgtctggacaaggccatagtttacatgaacagattgctaacttagctggcagtcctgctattaaaaaaggtattttacagactgtaaaaattgttgatgaactggtcaaagtaatggggcataagccagaaaatatcgttattgaaatggcacgtgaaaatcagacaactcaaaagggccagaaaaattcgcgagagcgtatgaaacgaatcgaagaaggtatcaaagaattaggaagtcagattcttaaagagcatcctgttgaaaatactcaattgcaaaatgaaaagctctatctctattatctacaaaatggaagagacatgtatgtggaccaagaattagatattaatcgtttaagtgattatgatgtcgatcacattgttccacaaagtttcattaaagacgattcaatagacaataaggtactaacgcgttctgataaaaatcgtggtaaatcggataacgttccaagtgaagaagtagtcaaaaagatgaaaaactattggagacaacttctaaacgccaagttaatcactcaacgtaagtttgataatttaacgaaagctgaacgtggaggtttgagtgaacttgataaagctggttttatcaaacgccaattggttgaaactcgccaaatcactaagcatgtggcacaaattttggatagtcgcatgaatactaaatacgatgaaaatgataaacttattcgagaggttaaagtgattaccttaaaatctaaattagtttctgacttccgaaaagatttccaattctataaagtacgtgagattaacaattaccatcatgcccatgatgcgtatctaaatgccgtcgttggaactgctttgattaagaaatatccaaaacttgaatcggagtttgtctatggtgattataaagtttatgatgttcgtaaaatgattgctaagtctgagcaagaaataggcaaagcaaccgcaaaatatttcttttactctaatatcatgaacttcttcaaaacagaaattacacttgcaaatggagagattcgcaaacgccctctaatcgaaactaatggggaaactggagaaattgtctgggataaagggcgagattttgccacagtgcgcaaagtattgtccatgccccaagtcaatattgtcaagaaaacagaagtacagacaggcggattctccaaggagtcaattttaccaaaaagaaattcggacaagcttattgctcgtaaaaaagactgggatccaaaaaaatatggtggttttgatagtccaacggtagcttattcagtcctagtggttgctaaggtggaaaaagggaaatcgaagaagttaaaatccgttaaagagttactagggatcacaattatggaaagaagttcctttgaaaaaaatccgattgactttttagaagctaaaggatataaggaagttaaaaaagacttaatcattaaactacctaaatatagtctttttgagttagaaaacggtcgtaaacggatgctggctagtgccggagaattacaaaaaggaaatgagctggctctgccaagcaaatatgtgaattttttatatttagctagtcattatgaaaagttgaagggtagtccagaagataacgaacaaaaacaattgtttgtggagcagcataagcattatttagatgagattattgagcaaatcagtgaattttctaagcgtgttattttagcagatgccaatttagataaagttcttagtgcatataacaaacatagagacaaaccaatacgtgaacaagcagaaaatattattcatttatttacgttgacgaatcttggagctcccgctgcttttaaatattttgatacaacaattgatcgtaaacgatatacgtctacaaaagaagttttagatgccactcttatccatcaatccatcactggtctttatgaaacacgcattgatttgagtcagctaggaggtgactga

SEQ ID NO: 199 - protein, 1367 aa, Streptococcus pyogenes
  REGION 1..1367: note = MISC_FEATURE - spCas9 polypeptide sequence
MDKKYSIGLDIGTNSVGWAVITDDYKVPSKKFKVLGNTDRHSIKKNLIGALLFGSGETAEATRLKRTARRRYTRRKNRICYLQEIFSNEMAKVDDSFFHRLEESFLVEEDKKHERHPIFGNIVDEVAYHEKYPTIYHLRKKLADSTDKADLRLIYLALAHMIKFRGHFLIEGDLNPDNSDVDKLFIQLVQIYNQLFEENPINASRVDAKAILSARLSKSRRLENLIAQLPGEKRNGLFGNLIALSLGLTPNFKSNFDLAEDAKLQLSKDTYDDDLDNLLAQIGDQYADLFLAAKNLSDAILLSDILRVNSEITKAPLSASMIKRYDEHHQDLTLLKALVRQQLPEKYKEIFFDQSKNGYAGYIDGGASQEEFYKFIKPILEKMDGTEELLVKLNREDLLRKQRTFDNGSIPHQIHLGELHAILRRQEDFYPFLKDNREKIEKILTFRIPYYVGPLARGNSRFAWMTRKSEETITPWNFEEVVDKGASAQSFIERMTNFDKNLPNEKVLPKHSLLYEYFTVYNELTKVKYVTEGMRKPAFLSGEQKKAIVDLLFKTNRKVTVKQLKEDYFKKIECFDSVEISGVEDRFNASLGAYHDLLKIIKDKDFLDNEENEDILEDIVLTLTLFEDRGMIEERLKTYAHLFDDKVMKQLKRRRYTGWGRLSRKLINGIRDKQSGKTILDFLKSDGFANRNFMQLIHDDSLTFKEDIQKAQVSGQGHSLHEQIANLAGSPAIKKGILQTVKIVDELVKVMGHKPENIVIEMARENQTTQKGQKNSRERMKRIEEGIKELGSQILKEHPVENTQLQNEKLYLYYLQNGRDMYVDQELDINRLSDYDVDHIVPQSFIKDDSIDNKVLTRSDKNRGKSDNVPSEEVVKKMKNYWRQLLNAKLITQRKFDNLTKAERGGLSELDKAGFIKRQLVETRQITKHVAQILDSRMNTKYDENDKLIREVKVITLKSKLVSDFRKDFQFYKVREINNYHHAHDAYLNAVVGTALIKKYPKLESEFVYGDYKVYDVRKMIAKSEQEIGKATAKYFFYSNIMNFFKTEITLANGEIRKRPLIETNGETGEIVWDKGRDFATVRKVLSMPQVNIVKKTEVQTGGFSKESILPKRNSDKLIARKKDWDPKKYGGFDSPTVAYSVLVVAKVEKGKSKKLKSVKELLGITIMERSSFEKNPIDFLEAKGYKEVKKDLIIKLPKYSLFELENGRKRMLASAGELQKGNELALPSKYVNFLYLASHYEKLKGSPEDNEQKQLFVEQHKHYLDEIIEQISEFSKRVILADANLDKVLSAYNKHRDKPIREQAENIIHLFTLTNLGAPAAFKYFDTTIDRKRYTSTKEVLDATLIHQSITGLYETRIDLSQLGGD

SEQ ID NO: 200 - DNA, 4212 bp, synthetic construct
  misc_feature 1..4212: note = wild-type Cas9 polynucleotide sequence
  misc_feature 5..58: note = RuvC domain
  misc_feature 718..764: note = RuvC domain
  misc_feature 772..901: note = HNH domain
  misc_feature 906..1101: note = RuvC domain
  source 1..4212: mol_type = other DNA
atggataaaaagtattctattggtttagacatcggcactaattccgttggatgggctgtcataaccgatgaatacaaagtaccttcaaagaaatttaaggtgttggggaacacagaccgtcattcgattaaaaagaatcttatcggtgccctcctattcgatagtggcgaaacggcagaggcgactcgcctgaaacgaaccgctcggagaaggtatacacgtcgcaagaaccgaatatgttacttacaagaaatttttagcaatgagatggccaaagttgacgattctttctttcaccgtttggaagagtccttccttgtcgaagaggacaagaaacatgaacggcaccccatctttggaaacatagtagatgaggtggcatatcatgaaaagtacccaacgatttatcacctcagaaaaaagctagttgactcaactgataaagcggacctgaggttaatctacttggctcttgcccatatgataaagttccgtgggcactttctcattgagggtgatctaaatccggacaactcggatgtcgacaaactgttcatccagttagtacaaacctataatcagttgtttgaagagaaccctataaatgcaagtggcgtggatgcgaaggctattcttagcgcccgcctctctaaatcccgacggctagaaaacctgatcgcacaattacccggagagaagaaaaatgggttgttcggtaaccttatagcgctctcactaggcctgacaccaaattttaagtcgaacttcgacttagctgaagatgccaaattgcagcttagtaaggacacgtacgatgacgatctcgacaatctactggcacaaattggagatcagtatgcggacttatttttggctgccaaaaaccttagcgatgcaatcctcctatctgacatactgagagttaatactgagattaccaaggcgccgttatccgcttcaatgatcaaaaggtacgatgaacatcaccaagacttgacacttctcaaggccctagtccgtcagcaactgcctgagaaatataaggaaatattctttgatcagtcgaaaaacgggtacgcaggttatattgacggcggagcgagtcaagaggaattctacaagtttatcaaacccatattagagaagatggatgggacggaagagttgcttgtaaaactcaatcgcgaagatctactgcgaaagcagcggactttcgacaacggtagcattccacatcaaatccacttaggcgaattgcatgctatacttagaaggcaggaggatttttatccgttcctcaaagacaatcgtgaaaagattgagaaaatcctaacctttcgcataccttactatgtgggacccctggcccgagggaactctcggttcgcatggatgacaagaaagtccgaagaaacgattactccatggaattttgaggaagttgtcgataaaggtgcgtcagctcaatcgttcatcgagaggatgaccaactttgacaagaatttaccgaacgaaaaagtattgcctaagcacagtttactttacgagtatttcacagtgtacaatgaactcacgaaagttaagtatgtcactgagggcatgcgtaaacccgcctttctaagcggagaacagaagaaagcaatagtagatctgttattcaagaccaaccgcaaagtgacagttaagcaattgaaagaggactactttaagaaaattgaatgcttcgattctgtcgagatctccggggtagaagatcgatttaatgcgtcacttggtacgtatcatgacctcctaaagataattaaagataaggacttcctggataacgaagagaatgaagatatcttagaagatatagtgttgactcttaccctctttgaagatcgggaaatgattgaggaaagactaaaaacatacgctcacctgttcgacgataaggttatgaaacagttaaagaggcgtcgctatacgggctggggacgattgtcgcggaaacttatcaacgggataagagacaagcaaagtggtaaaactattctcgattttctaaagagcgacggcttcgccaataggaactttatgcagctgatccatgatgactctttaaccttcaaagaggatatacaaaaggcacaggtttccggacaaggggactcattgcacgaacatattgcgaatcttgctggttcgccagccatcaaaaagggcatactccagacagtcaaagtagtggatgagctagttaaggtcatgggacgtcacaaaccggaaaacattgtaatcgagatggcacgcgaaaatcaaacgactcagaaggggcaaaaaaacagtcgagagcggatgaagagaatagaagagggtattaaagaactgggcagccagatcttaaaggagcatcctgtggaaaatacccaattgcagaacgagaaactttacctctattacctacaaaatggaagggacatgtatgttgatcaggaactggacataaaccgtttatctgattacgacgtcgatcacattgtaccccaatcctttttgaaggacgattcaatcgacaataaagtgcttacacgctcggataagaaccgagggaaaagtgacaatgttccaagcgaggaagtcgtaaagaaaatgaagaactattggcggcagctcctaaatgcgaaactgataacgcaaagaaagttcgataacttaactaaagctgagaggggtggcttgtctgaacttgacaaggccggatttattaaacgtcagctcgtggaaacccgccaaatcacaaagcatgttgcacagatactagattcccgaatgaatacgaaatacgacgagaacgataagctgattcgggaagtcaaagtaatcactttaaagtcaaaattggtgtcggacttcagaaaggattttcaattctataaagttagggagataaataactaccaccatgcgcacgacgcttatcttaatgccgtcgtagggaccgcactcattaagaaatacccgaagctagaaagtgagtttgtgtatggtgattacaaagtttatgacgtccgtaagatgatcgcgaaaagcgaacaggagataggcaaggctacagccaaatacttcttttattctaacattatgaatttctttaagacggaaatcactctggcaaacggagagatacgcaaacgacctttaattgaaaccaatggggagacaggtgaaatcgtatgggataagggccgggacttcgcgacggtgagaaaagttttgtccatgccccaagtcaacatagtaaagaaaactgaggtgcagaccggagggttttcaaaggaatcgattcttccaaaaaggaatagtgataagctcatcgctcgtaaaaaggactgggacccgaaaaagtacggtggcttcgatagccctacagttgcctattctgtcctagtagtggcaaaagttgagaagggaaaatccaagaaactgaagtcagtcaaagaattattggggataacgattatggagcgctcgtcttttgaaaagaaccccatcgacttccttgaggcgaaaggttacaaggaagtaaaaaaggatctcataattaaactaccaaagtatagtctgtttgagttagaaaatggccgaaaacggatgttggctagcgccggagagcttcaaaaggggaacgaactcgcactaccgtctaaatacgtgaatttcctgtatttagcgtcccattacgagaagttgaaaggttcacctgaagataacgaacagaagcaactttttgttgagcagcacaaacattatctcgacgaaatcatagagcaaatttcggaattcagtaagagagtcatcctagctgatgccaatctggacaaagtattaagcgcatacaacaagcacagggataaacccatacgtgagcaggcggaaaatattatccatttgtttactcttaccaacctcggcgctccagccgcattcaagtattttgacacaacgatagatcgcaaacgatacacttctaccaaggaggtgctagacgcgacactgattcaccaatccatcacgggattatatgaaactcggatagatttgtcacagcttgggggtgacggatcccccaagaagaagaggaaagtctcgagcgactacaaagaccatgacggtgattataaagatcatgacatcgattacaaggatgacgatgacaaggctgcagga

SEQ ID NO: 201 - protein, 1368 aa, synthetic construct
  REGION 1..1368: note = exemplary catalytically active Cas9 nickase (nCas9) polypeptide sequence
MDKKYSIGLAIGTNSVGWAVITDEYKVPSKKFKVLGNTDRHSIKKNLIGALLFDSGETAEATRLKRTARRRYTRRKNRICYLQEIFSNEMAKVDDSFFHRLEESFLVEEDKKHERHPIFGNIVDEVAYHEKYPTIYHLRKKLVDSTDKADLRLIYLALAHMIKFRGHFLIEGDLNPDNSDVDKLFIQLVQTYNQLFEENPINASGVDAKAILSARLSKSRRLENLIAQLPGEKKNGLFGNLIALSLGLTPNFKSNFDLAEDAKLQLSKDTYDDDLDNLLAQIGDQYADLFLAAKNLSDAILLSDILRVNTEITKAPLSASMIKRYDEHHQDLTLLKALVRQQLPEKYKEIFFDQSKNGYAGYIDGGASQEEFYKFIKPILEKMDGTEELLVKLNREDLLRKQRTFDNGSIPHQIHLGELHAILRRQEDFYPFLKDNREKIEKILTFRIPYYVGPLARGNSRFAWMTRKSEETITPWNFEEVVDKGASAQSFIERMTNFDKNLPNEKVLPKHSLLYEYFTVYNELTKVKYVTEGMRKPAFLSGEQKKAIVDLLFKTNRKVTVKQLKEDYFKKIECFDSVEISGVEDRFNASLGTYHDLLKIIKDKDFLDNEENEDILEDIVLTLTLFEDREMIEERLKTYAHLFDDKVMKQLKRRRYTGWGRLSRKLINGIRDKQSGKTILDFLKSDGFANRNFMQLIHDDSLTFKEDIQKAQVSGQGDSLHEHIANLAGSPAIKKGILQTVKVVDELVKVMGRHKPENIVIEMARENQTTQKGQKNSRERMKRIEEGIKELGSQILKEHPVENTQLQNEKLYLYYLQNGRDMYVDQELDINRLSDYDVDHIVPQSFLKDDSIDNKVLTRSDKNRGKSDNVPSEEVVKKMKNYWRQLLNAKLITQRKFDNLTKAERGGLSELDKAGFIKRQLVETRQITKHVAQILDSRMNTKYDENDKLIREVKVITLKSKLVSDFRKDFQFYKVREINNYHHAHDAYLNAVVGTALIKKYPKLESEFVYGDYKVYDVRKMIAKSEQEIGKATAKYFFYSNIMNFFKTEITLANGEIRKRPLIETNGETGEIVWDKGRDFATVRKVLSMPQVNIVKKTEVQTGGFSKESILPKRNSDKLIARKKDWDPKKYGGFDSPTVAYSVLVVAKVEKGKSKKLKSVKELLGITIMERSSFEKNPIDFLEAKGYKEVKKDLIIKLPKYSLFELENGRKRMLASAGELQKGNELALPSKYVNFLYLASHYEKLKGSPEDNEQKQLFVEQHKHYLDEIIEQISEFSKRVILADANLDKVLSAYNKHRDKPIREQAENIIHLFTLTNLGAPAAFKYFDTTIDRKRYTSTKEVLDATLIHQSITGLYETRIDLSQLGGD

SEQ ID NO: 202 - DNA, 4107 bp, Streptococcus pyogenes
  misc_feature 1..4107: note = Cas9 from Streptococcus pyogenes (NCBI Ref. Seq.: NC_002737.2)polynucleotide sequence
  source 1..4107: mol_type = genomic DNA
atggataagaaatactcaataggcttagatatcggcacaaatagcgtcggatgggcggtgatcactgatgaatataaggttccgtctaaaaagttcaaggttctgggaaatacagaccgccacagtatcaaaaaaaatcttataggggctcttttatttgacagtggagagacagcggaagcgactcgtctcaaacggacagctcgtagaaggtatacacgtcggaagaatcgtatttgttatctacaggagattttttcaaatgagatggcgaaagtagatgatagtttctttcatcgacttgaagagtcttttttggtggaagaagacaagaagcatgaacgtcatcctatttttggaaatatagtagatgaagttgcttatcatgagaaatatccaactatctatcatctgcgaaaaaaattggtagattctactgataaagcggatttgcgcttaatctatttggccttagcgcatatgattaagtttcgtggtcattttttgattgagggagatttaaatcctgataatagtgatgtggacaaactatttatccagttggtacaaacctacaatcaattatttgaagaaaaccctattaacgcaagtggagtagatgctaaagcgattctttctgcacgattgagtaaatcaagacgattagaaaatctcattgctcagctccccggtgagaagaaaaatggcttatttgggaatctcattgctttgtcattgggtttgacccctaattttaaatcaaattttgatttggcagaagatgctaaattacagctttcaaaagatacttacgatgatgatttagataatttattggcgcaaattggagatcaatatgctgatttgtttttggcagctaagaatttatcagatgctattttactttcagatatcctaagagtaaatactgaaataactaaggctcccctatcagcttcaatgattaaacgctacgatgaacatcatcaagacttgactcttttaaaagctttagttcgacaacaacttccagaaaagtataaagaaatcttttttgatcaatcaaaaaacggatatgcaggttatattgatgggggagctagccaagaagaattttataaatttatcaaaccaattttagaaaaaatggatggtactgaggaattattggtgaaactaaatcgtgaagatttgctgcgcaagcaacggacctttgacaacggctctattccccatcaaattcacttgggtgagctgcatgctattttgagaagacaagaagacttttatccatttttaaaagacaatcgtgagaagattgaaaaaatcttgacttttcgaattccttattatgttggtccattggcgcgtggcaatagtcgttttgcatggatgactcggaagtctgaagaaacaattaccccatggaattttgaagaagttgtcgataaaggtgcttcagctcaatcatttattgaacgcatgacaaactttgataaaaatcttccaaatgaaaaagtactaccaaaacatagtttgctttatgagtattttacggtttataacgaattgacaaaggtcaaatatgttactgaaggaatgcgaaaaccagcatttctttcaggtgaacagaagaaagccattgttgatttactcttcaaaacaaatcgaaaagtaaccgttaagcaattaaaagaagattatttcaaaaaaatagaatgttttgatagtgttgaaatttcaggagttgaagatagatttaatgcttcattaggtacctaccatgatttgctaaaaattattaaagataaagattttttggataatgaagaaaatgaagatatcttagaggatattgttttaacattgaccttatttgaagatagggagatgattgaggaaagacttaaaacatatgctcacctctttgatgataaggtgatgaaacagcttaaacgtcgccgttatactggttggggacgtttgtctcgaaaattgattaatggtattagggataagcaatctggcaaaacaatattagattttttgaaatcagatggttttgccaatcgcaattttatgcagctgatccatgatgatagtttgacatttaaagaagacattcaaaaagcacaagtgtctggacaaggcgatagtttacatgaacatattgcaaatttagctggtagccctgctattaaaaaaggtattttacagactgtaaaagttgttgatgaattggtcaaagtaatggggcggcataagccagaaaatatcgttattgaaatggcacgtgaaaatcagacaactcaaaagggccagaaaaattcgcgagagcgtatgaaacgaatcgaagaaggtatcaaagaattaggaagtcagattcttaaagagcatcctgttgaaaatactcaattgcaaaatgaaaagctctatctctattatctccaaaatggaagagacatgtatgtggaccaagaattagatattaatcgtttaagtgattatgatgtcgatcacattgttccacaaagtttccttaaagacgattcaatagacaataaggtcttaacgcgttctgataaaaatcgtggtaaatcggataacgttccaagtgaagaagtagtcaaaaagatgaaaaactattggagacaacttctaaacgccaagttaatcactcaacgtaagtttgataatttaacgaaagctgaacgtggaggtttgagtgaacttgataaagctggttttatcaaacgccaattggttgaaactcgccaaatcactaagcatgtggcacaaattttggatagtcgcatgaatactaaatacgatgaaaatgataaacttattcgagaggttaaagtgattaccttaaaatctaaattagtttctgacttccgaaaagatttccaattctataaagtacgtgagattaacaattaccatcatgcccatgatgcgtatctaaatgccgtcgttggaactgctttgattaagaaatatccaaaacttgaatcggagtttgtctatggtgattataaagtttatgatgttcgtaaaatgattgctaagtctgagcaagaaataggcaaagcaaccgcaaaatatttcttttactctaatatcatgaacttcttcaaaacagaaattacacttgcaaatggagagattcgcaaacgccctctaatcgaaactaatggggaaactggagaaattgtctgggataaagggcgagattttgccacagtgcgcaaagtattgtccatgccccaagtcaatattgtcaagaaaacagaagtacagacaggcggattctccaaggagtcaattttaccaaaaagaaattcggacaagcttattgctcgtaaaaaagactgggatccaaaaaaatatggtggttttgatagtccaacggtagcttattcagtcctagtggttgctaaggtggaaaaagggaaatcgaagaagttaaaatccgttaaagagttactagggatcacaattatggaaagaagttcctttgaaaaaaatccgattgactttttagaagctaaaggatataaggaagttaaaaaagacttaatcattaaactacctaaatatagtctttttgagttagaaaacggtcgtaaacggatgctggctagtgccggagaattacaaaaaggaaatgagctggctctgccaagcaaatatgtgaattttttatatttagctagtcattatgaaaagttgaagggtagtccagaagataacgaacaaaaacaattgtttgtggagcagcataagcattatttagatgagattattgagcaaatcagtgaattttctaagcgtgttattttagcagatgccaatttagataaagttcttagtgcatataacaaacatagagacaaaccaatacgtgaacaagcagaaaatattattcatttatttacgttgacgaatcttggagctcccgctgcttttaaatattttgatacaacaattgatcgtaaacgatatacgtctacaaaagaagttttagatgccactcttatccatcaatccatcactggtctttatgaaacacgcattgatttgagtcagctaggaggtgactga

SEQ ID NO: 203 - protein, 1368 aa, synthetic construct
  REGION 1..1368: note = catalytically inactive Cas9 (dCas9)polypeptide sequence
  REGION 5..58: note = MISC_FEATURE - RuvC domain
  REGION 718..764: note = MISC_FEATURE - RuvC domain
  REGION 773..902: note = MISC_FEATURE - HNH domain
  REGION 907..1102: note = MISC_FEATURE - RuvC domain
MDKKYSIGLAIGTNSVGWAVITDEYKVPSKKFKVLGNTDRHSIKKNLIGALLFDSGETAEATRLKRTARRRYTRRKNRICYLQEIFSNEMAKVDDSFFHRLEESFLVEEDKKHERHPIFGNIVDEVAYHEKYPTIYHLRKKLVDSTDKADLRLIYLALAHMIKFRGHFLIEGDLNPDNSDVDKLFIQLVQTYNQLFEENPINASGVDAKAILSARLSKSRRLENLIAQLPGEKKNGLFGNLIALSLGLTPNFKSNFDLAEDAKLQLSKDTYDDDLDNLLAQIGDQYADLFLAAKNLSDAILLSDILRVNTEITKAPLSASMIKRYDEHHQDLTLLKALVRQQLPEKYKEIFFDQSKNGYAGYIDGGASQEEFYKFIKPILEKMDGTEELLVKLNREDLLRKQRTFDNGSIPHQIHLGELHAILRRQEDFYPFLKDNREKIEKILTFRIPYYVGPLARGNSRFAWMTRKSEETITPWNFEEVVDKGASAQSFIERMTNFDKNLPNEKVLPKHSLLYEYFTVYNELTKVKYVTEGMRKPAFLSGEQKKAIVDLLFKTNRKVTVKQLKEDYFKKIECFDSVEISGVEDRFNASLGTYHDLLKIIKDKDFLDNEENEDILEDIVLTLTLFEDREMIEERLKTYAHLFDDKVMKQLKRRRYTGWGRLSRKLINGIRDKQSGKTILDFLKSDGFANRNFMQLIHDDSLTFKEDIQKAQVSGQGDSLHEHIANLAGSPAIKKGILQTVKVVDELVKVMGRHKPENIVIEMARENQTTQKGQKNSRERMKRIEEGIKELGSQILKEHPVENTQLQNEKLYLYYLQNGRDMYVDQELDINRLSDYDVDAIVPQSFLKDDSIDNKVLTRSDKNRGKSDNVPSEEVVKKMKNYWRQLLNAKLITQRKFDNLTKAERGGLSELDKAGFIKRQLVETRQITKHVAQILDSRMNTKYDENDKLIREVKVITLKSKLVSDFRKDFQFYKVREINNYHHAHDAYLNAVVGTALIKKYPKLESEFVYGDYKVYDVRKMIAKSEQEIGKATAKYFFYSNIMNFFKTEITLANGEIRKRPLIETNGETGEIVWDKGRDFATVRKVLSMPQVNIVKKTEVQTGGFSKESILPKRNSDKLIARKKDWDPKKYGGFDSPTVAYSVLVVAKVEKGKSKKLKSVKELLGITIMERSSFEKNPIDFLEAKGYKEVKKDLIIKLPKYSLFELENGRKRMLASAGELQKGNELALPSKYVNFLYLASHYEKLKGSPEDNEQKQLFVEQHKHYLDEIIEQISEFSKRVILADANLDKVLSAYNKHRDKPIREQAENIIHLFTLTNLGAPAAFKYFDTTIDRKRYTSTKEVLDATLIHQSITGLYETRIDLSQLGGD

SEQ ID NO: 204 - protein, 345 aa, Sulfolobus islandicus
  REGION 1..345: note = MISC_FEATURE - tr|F0NN87|F0NN87_SULIHCRISPR-associatedCasx protein OS =Sulfolobus islandicus (strain HVE10/4) GN = SiH_0402 PE=4; SV = 1);CasX polypeptide sequence
MEVPLYNIFGDNYIIQVATEAENSTIYNNKVEIDDEELRNVLNLAYKIAKNNEDAAAERRGKAKKKKGEEGETTTSNIILPLSGNDKNPWTETLKCYNFPTTVALSEVFKNFSQVKECEEVSAPSFVKPEFYEFGRSPGMVERTRRVKLEVEPHYLIIAAAGWVLTRLGKAKVSEGDYVGVNVFTPTRGILYSLIQNVNGIVPGIKPETAFGLWIARKVVSSVTNPNVSVVRIYTISDAVGQNPTTINGGFSIDLTKLLEKRYLLSERLEAIARNALSISSNMRERYIVLANYIYEYLTGSKRLEDLLYFANRDLIMNLNSDDGKVRDLKLISAYVNGELIRGEG

SEQ ID NO: 205 - protein, 345 aa, Sulfolobus islandicus
  REGION 1..345: note = MISC_FEATURE - tr|F0NH53|F0NH53_SULIR CRISPR associated protein, Casx OS =Sulfolobus islandicus (strain REY15A) GN=SiRe_0771 PE=4 SV=1);CasX polypeptide sequence
MEVPLYNIFGDNYIIQVATEAENSTIYNNKVEIDDEELRNVLNLAYKIAKNNEDAAAERRGKAKKKKGEEGETTTSNIILPLSGNDKNPWTETLKCYNFPTTVALSEVFKNFSQVKECEEVSAPSFVKPEFYKFGRSPGMVERTRRVKLEVEPHYLIMAAAGWVLTRLGKAKVSEGDYVGVNVFTPTRGILYSLIQNVNGIVPGIKPETAFGLWIARKVVSSVTNPNVSVVSIYTISDAVGQNPTTINGGFSIDLTKLLEKRDLLSERLEAIARNALSISSNMRERYIVLANYIYEYLTGSKRLEDLLYFANRDLIMNLNSDDGKVRDLKLISAYVNGELIRGEG

SEQ ID NO: 206 - protein, 987 aa, unidentified
  REGION 1..987: note = MISC_FEATURE - CasX polypeptide sequence
MEKRINKIRKKLSADNATKPVSRSGPMKTLLVRVMTDDLKKRLEKRRKKPEVMPQVISNNAANNLRMLLDDYTKMKEAILQVYWQEFKDDHVGLMCKFAQPASKKIDQNKLKPEMDEKGNLTTAGFACSQCGQPLFVYKLEQVSEKGKAYTNYFGRCNVAEHEKLILLAQLKPVKDSDEAVTYSLGKFGQRALDFYSIHVTKESTHPVKPLAQIAGNRYASGPVGKALSDACMGTIASFLSKYQDIIIEHQKVVKGNQKRLESLRELAGKENLEYPSVTLPPQPHTKEGVDFAYNEVIARVRMWVNLNLWQKLKLSRDDAKPLLRLKGFPSFPVVERRENEVDWWNTINEVKKLIDAKRDMGRVFWSGVTAEKRNTILEGYNYLPNENDHKKREGSLENPKKPAKRQFGDLLLYLEKKYAGDWGKVFDEAWERIDKKIAGLTSHIEREEARNAEDAQSKAVLTDWLRAKASFVLERLKEMDEKEFYACEIQLQKWYGDLRGNPFAVEAENRVVDISGFSIGSDGHSIQYRNLLAWKYLENGKREFYLLMNYGKKGRIRFTDGTDIKKSGKWQGLLYGGGKAKVIDLTFDPDDEQLIILPLAFGTRQGREFIWNDLLSLETGLIKLANGRVIEKTIYNKKIGRDEPALFVALTFERREVVDPSNIKPVNLIGVARGENIPAVIALTDPEGCPLPEFKDSSGGPTDILRIGEGYKEKQRAIQAAKEVEQRRAGGYSRKFASKSRNLADDMVRNSARDLFYHAVTHDAVLVFANLSRGFGRQGKRTFMTERQYTKMEDWLTAKLAYEGLTSKTYLSKTLAQYTSKTCSNCGFTITYADMDVMLVRLKKTSDGWATTLNNKELKAEYQITYYNRYKRQTVEKELSAELDRLSEESGNNDISKWTKGRRDEALFLLKKRFSHRPVQEQFVCLDCGHEVHAAEQAALNIARSWLFLNSNSTEFKSYKSGKQPFVGAWQAFYKRRLKEVWKPNA

SEQ ID NO: 207 - protein, 1210 aa, unidentified
  REGION 1..1210: note = MISC_FEATURE - APG80656.1 CRISPR-associated protein CasY [uncultured Parcubacteria group bacterium]; CasY polypeptide sequence
MSKRHPRISGVKGYRLHAQRLEYTGKSGAMRTIKYPLYSSPSGGRTVPREIVSAINDDYVGLYGLSNFDDLYNAEKRNEEKVYSVLDFWYDCVQYGAVFSYTAPGLLKNVAEVRGGSYELTKTLKGSHLYDELQIDKVIKFLNKKEISRANGSLDKLKKDIIDCFKAEYRERHKDQCNKLADDIKNAKKDAGASLGERQKKLFRDFFGISEQSENDKPSFTNPLNLTCCLLPFDTVNNNRNRGEVLFNKLKEYAQKLDKNEGSLEMWEYIGIGNSGTAFSNFLGEGFLGRLRENKITELKKAMMDITDAWRGQEQEEELEKRLRILAALTIKLREPKFDNHWGGYRSDINGKLSSWLQNYINQTVKIKEDLKGHKKDLKKAKEMINRFGESDTKEEAVVSSLLESIEKIVPDDSADDEKPDIPAIAIYRRFLSDGRLTLNRFVQREDVQEALIKERLEAEKKKKPKKRKKKSDAEDEKETIDFKELFPHLAKPLKLVPNFYGDSKRELYKKYKNAAIYTDALWKAVEKIYKSAFSSSLKNSFFDTDFDKDFFIKRLQKIFSVYRRFNTDKWKPIVKNSFAPYCDIVSLAENEVLYKPKQSRSRKSAAIDKNRVRLPSTENIAKAGIALARELSVAGFDWKDLLKKEEHEEYIDLIELHKTALALLLAVTETQLDISALDFVENGTVKDFMKTRDGNLVLEGRFLEMFSQSIVFSELRGLAGLMSRKEFITRSAIQTMNGKQAELLYIPHEFQSAKITTPKEMSRAFLDLAPAEFATSLEPESLSEKSLLKLKQMRYYPHYFGYELTRTGQGIDGGVAENALRLEKSPVKKREIKCKQYKTLGRGQNKIVLYVRSSYYQTQFLEWFLHRPKNVQTDVAVSGSFLIDEKKVKTRWNYDALTVALEPVSGSERVFVSQPFTIFPEKSAEEEGQRYLGIDIGEYGIAYTALEITGDSAKILDQNFISDPQLKTLREEVKGLKLDQRRGTFAMPSTKIARIRESLVHSLRNRIHHLALKHKAKIVYELEVSRFEEGKQKIKKVYATLKKADVYSEIDADKNLQTTVWGKLAVASEISASYTSQFCGACKKLWRAEMQVDETITTQELIGTVRVIKGGTLIDAIKDFMRPPIFDENDTPFPKYRDFCDKHHISKKMRGNSCLFICPFCRANADADIQASQTIALLRYVKEEKKVEDYFERFRKLKNIKVLGQMKKI

SEQ ID NO: 208 - protein, 1082 aa, Neisseria meningitidis
  REGION 1..1082: note = MISC_FEATURE - NCBI Reference: WP_002235162.1; type II CRISPR RNA-guided endonuclease Cas9; Nme1Cas9 polypeptide sequence
MAAFKPNPINYILGLDIGIASVGWAMVEIDEDENPICLIDLGVRVFERAEVPKTGDSLAMARRLARSVRRLTRRRAHRLLRARRLLKREGVLQAADFDENGLIKSLPNTPWQLRAAALDRKLTPLEWSAVLLHLIKHRGYLSQRKNEGETADKELGALLKGVADNAHALQTGDFRTPAELALNKFEKESGHIRNQRGDYSHTFSRKDLQAELILLFEKQKEFGNPHVSGGLKEGIETLLMTQRPALSGDAVQKMLGHCTFEPAEPKAAKNTYTAERFIWLTKLNNLRILEQGSERPLTDTERATLMDEPYRKSKLTYAQARKLLGLEDTAFFKGLRYGKDNAEASTLMEMKAYHAISRALEKEGLKDKKSPLNLSPELQDEIGTAFSLFKTDEDITGRLKDRIQPEILEALLKHISFDKFVQISLKALRRIVPLMEQGKRYDEACAEIYGDHYGKKNTEEKIYLPPIPADEIRNPVVLRALSQARKVINGVVRRYGSPARIHIETAREVGKSFKDRKEIEKRQEENRKDREKAAAKFREYFPNFVGEPKSKDILKLRLYEQQHGKCLYSGKEINLGRLNEKGYVEIDHALPFSRTWDDSFNNKVLVLGSENQNKGNQTPYEYFNGKDNSREWQEFKARVETSRFPRSKKQRILLQKFDEDGFKERNLNDTRYVNRFLCQFVADRMRLTGKGKKRVFASNGQITNLLRGFWGLRKVRAENDRHHALDAVVVACSTVAMQQKITRFVRYKEMNAFDGKTIDKETGEVLHQKTHFPQPWEFFAQEVMIRVFGKPDGKPEFEEADTPEKLRTLLAEKLSSRPEAVHEYVTPLFVSRAPNRKMSGQGHMETVKSAKRLDEGVSVLRVPLTQLKLKDLEKMVNREREPKLYEALKARLEAHKDDPAKAFAEPFYKYDKAGNRTQQVKAVRVEQVQKTGVWVRNHNGIADNATMVRVDVFEKGDKYYLVPIYSWQVAKGILPDRAVVQGKDEEDWQLIDDSFNFKFSLHPNDLVEVITKKARMFGYFASCHRGTGNINIRIHDLDHKIGKNGILEGIGVKTALSFQKYQIDELGKEIRPCRLKKRPPVR

SEQ ID NO: 209 - protein, 1082 aa, Neisseria meningitidis
  REGION 1..1082: note = MISC_FEATURE - NCBI Reference: WP_002230835; type II CRISPR RNA-guided endonuclease Cas9; Nme2Cas9 polypeptide sequence
MAAFKPNPINYILGLDIGIASVGWAMVEIDEEENPIRLIDLGVRVFERAEVPKTGDSLAMARRLARSVRRLTRRRAHRLLRARRLLKREGVLQAADFDENGLIKSLPNTPWQLRAAALDRKLTPLEWSAVLLHLIKHRGYLSQRKNEGETADKELGALLKGVANNAHALQTGDFRTPAELALNKFEKESGHIRNQRGDYSHTFSRKDLQAELILLFEKQKEFGNPHVSGGLKEGIETLLMTQRPALSGDAVQKMLGHCTFEPAEPKAAKNTYTAERFIWLTKLNNLRILEQGSERPLTDTERATLMDEPYRKSKLTYAQARKLLGLEDTAFFKGLRYGKDNAEASTLMEMKAYHAISRALEKEGLKDKKSPLNLSSELQDEIGTAFSLFKTDEDITGRLKDRVQPEILEALLKHISFDKFVQISLKALRRIVPLMEQGKRYDEACAEIYGDHYGKKNTEEKIYLPPIPADEIRNPVVLRALSQARKVINGVVRRYGSPARIHIETAREVGKSFKDRKEIEKRQEENRKDREKAAAKFREYFPNFVGEPKSKDILKLRLYEQQHGKCLYSGKEINLVRLNEKGYVEIDHALPFSRTWDDSFNNKVLVLGSENQNKGNQTPYEYFNGKDNSREWQEFKARVETSRFPRSKKQRILLQKFDEDGFKECNLNDTRYVNRFLCQFVADHILLTGKGKRRVFASNGQITNLLRGFWGLRKVRAENDRHHALDAVVVACSTVAMQQKITRFVRYKEMNAFDGKTIDKETGKVLHQKTHFPQPWEFFAQEVMIRVFGKPDGKPEFEEADTPEKLRTLLAEKLSSRPEAVHEYVTPLFVSRAPNRKMSGAHKDTLRSAKRFVKHNEKISVKRVWLTEIKLADLENMVNYKNGREIELYEALKARLEAYGGNAKQAFDPKDNPFYKKGGQLVKAVRVEKTQESGVLLNKKNAYTIADNGDMVRVDVFCKVDKKGKNQYFIVPIYAWQVAENILPDIDCKGYRIDDSYTFCFSLHKYDLIAFQKDEKSKVEFAYYINCDSSNGRFYLAWHDKGSKEQQFRISTQNLVLIQKYQVNELGKEIRPCRLKKRPPVR

SEQ ID NO: 210 - protein, 1300 aa, Francisella novicida
  REGION 1..1300: note = MISC_FEATURE - wild type Cpf1 polypeptide sequence
MSIYQEFVNKYSLSKTLRFELIPQGKTLENIKARGLILDDEKRAKDYKKAKQIIDKYHQFFIEEILSSVCISEDLLQNYSDVYFKLKKSDDDNLQKDFKSAKDTIKKQISEYIKDSEKFKNLFNQNLIDAKKGQESDLILWLKQSKDNGIELFKANSDITDIDEALEIIKSFKGWTTYFKGFHENRKNVYSSNDIPTSIIYRIVDDNLPKFLENKAKYESLKDKAPEAINYEQIKKDLAEELTFDIDYKTSEVNQRVFSLDEVFEIANFNNYLNQSGITKFNTIIGGKFVNGENTKRKGINEYINLYSQQINDKTLKKYKMSVLFKQILSDTESKSFVIDKLEDDSDVVTTMQSFYEQIAAFKTVEEKSIKETLSLLFDDLKAQKLDLSKIYFKNDKSLTDLSQQVFDDYSVIGTAVLEYITQQIAPKNLDNPSKKEQELIAKKTEKAKYLSLETIKLALEEFNKHRDIDKQCRFEEILANFAAIPMIFDEIAQNKDNLAQISIKYQNQGKKDLLQASAEDDVKAIKDLLDQTNNLLHKLKIFHISQSEDKANILDKDEHFYLVFEECYFELANIVPLYNKIRNYITQKPYSDEKFKLNFENSTLANGWDKNKEPDNTAILFIKDDKYYLGVMNKKNNKIFDDKAIKENKGEGYKKIVYKLLPGANKMLPKVFFSAKSIKFYNPSEDILRIRNHSTHTKNGSPQKGYEKFEFNIEDCRKFIDFYKQSISKHPEWKDFGFRFSDTQRYNSIDEFYREVENQGYKLTFENISESYIDSVVNQGKLYLFQIYNKDFSAYSKGRPNLHTLYWKALFDERNLQDVVYKLNGEAELFYRKQSIPKKITHPAKEAIANKNKDNPKKESVFEYDLIKDKRFTEDKFFFHCPITINFKSSGANKFNDEINLLLKEKANDVHILSIDRGERHLAYYTLVDGKGNIIKQDTFNIIGNDRMKTNYHDKLAAIEKDRDSARKDWKKINNIKEMKEGYLSQVVHEIAKLVIEYNAIVVFEDLNFGFKRGRFKVEKQVYQKLEKMLIEKLNYLVFKDNEFDKTGGVLRAYQLTAPFETFKKMGKQTGIIYYVPAGFTSKICPVTGFVNQLYPKYESVSKSQEFFSKFDKICYNLDKGYFEFSFDYKNFGDKAAKGKWTIASFGSRLINFRNSDKNHNWDTREVYPTKELEKLLKDYSIEYGHGECIKAAICGESDKKFFAKLTSVLNTILQMRNSKTGTELDYLISPVADVNGNFFDSRQAPKNMPQDADANGAYHIGLKGLMLLGRIKNNQEGKKLNLVIKNEEYFEFVQNRNN

SEQ ID NO: 211 - protein, 1300 aa, Francisella novicida
  REGION 1..1300: note = MISC_FEATURE - Cpf1 D917A polypeptide sequence
MSIYQEFVNKYSLSKTLRFELIPQGKTLENIKARGLILDDEKRAKDYKKAKQIIDKYHQFFIEEILSSVCISEDLLQNYSDVYFKLKKSDDDNLQKDFKSAKDTIKKQISEYIKDSEKFKNLFNQNLIDAKKGQESDLILWLKQSKDNGIELFKANSDITDIDEALEIIKSFKGWTTYFKGFHENRKNVYSSNDIPTSIIYRIVDDNLPKFLENKAKYESLKDKAPEAINYEQIKKDLAEELTFDIDYKTSEVNQRVFSLDEVFEIANFNNYLNQSGITKFNTIIGGKFVNGENTKRKGINEYINLYSQQINDKTLKKYKMSVLFKQILSDTESKSFVIDKLEDDSDVVTTMQSFYEQIAAFKTVEEKSIKETLSLLFDDLKAQKLDLSKIYFKNDKSLTDLSQQVFDDYSVIGTAVLEYITQQIAPKNLDNPSKKEQELIAKKTEKAKYLSLETIKLALEEFNKHRDIDKQCRFEEILANFAAIPMIFDEIAQNKDNLAQISIKYQNQGKKDLLQASAEDDVKAIKDLLDQTNNLLHKLKIFHISQSEDKANILDKDEHFYLVFEECYFELANIVPLYNKIRNYITQKPYSDEKFKLNFENSTLANGWDKNKEPDNTAILFIKDDKYYLGVMNKKNNKIFDDKAIKENKGEGYKKIVYKLLPGANKMLPKVFFSAKSIKFYNPSEDILRIRNHSTHTKNGSPQKGYEKFEFNIEDCRKFIDFYKQSISKHPEWKDFGFRFSDTQRYNSIDEFYREVENQGYKLTFENISESYIDSVVNQGKLYLFQIYNKDFSAYSKGRPNLHTLYWKALFDERNLQDVVYKLNGEAELFYRKQSIPKKITHPAKEAIANKNKDNPKKESVFEYDLIKDKRFTEDKFFFHCPITINFKSSGANKFNDEINLLLKEKANDVHILSIARGERHLAYYTLVDGKGNIIKQDTFNIIGNDRMKTNYHDKLAAIEKDRDSARKDWKKINNIKEMKEGYLSQVVHEIAKLVIEYNAIVVFEDLNFGFKRGRFKVEKQVYQKLEKMLIEKLNYLVFKDNEFDKTGGVLRAYQLTAPFETFKKMGKQTGIIYYVPAGFTSKICPVTGFVNQLYPKYESVSKSQEFFSKFDKICYNLDKGYFEFSFDYKNFGDKAAKGKWTIASFGSRLINFRNSDKNHNWDTREVYPTKELEKLLKDYSIEYGHGECIKAAICGESDKKFFAKLTSVLNTILQMRNSKTGTELDYLISPVADVNGNFFDSRQAPKNMPQDADANGAYHIGLKGLMLLGRIKNNQEGKKLNLVIKNEEYFEFVQNRNN

SEQ ID NO: 212 - protein, 1300 aa, Francisella novicida
  REGION 1..1300: note = MISC_FEATURE - Cpf1 E1006A polypeptide sequence
MSIYQEFVNKYSLSKTLRFELIPQGKTLENIKARGLILDDEKRAKDYKKAKQIIDKYHQFFIEEILSSVCISEDLLQNYSDVYFKLKKSDDDNLQKDFKSAKDTIKKQISEYIKDSEKFKNLFNQNLIDAKKGQESDLILWLKQSKDNGIELFKANSDITDIDEALEIIKSFKGWTTYFKGFHENRKNVYSSNDIPTSIIYRIVDDNLPKFLENKAKYESLKDKAPEAINYEQIKKDLAEELTFDIDYKTSEVNQRVFSLDEVFEIANFNNYLNQSGITKFNTIIGGKFVNGENTKRKGINEYINLYSQQINDKTLKKYKMSVLFKQILSDTESKSFVIDKLEDDSDVVTTMQSFYEQIAAFKTVEEKSIKETLSLLFDDLKAQKLDLSKIYFKNDKSLTDLSQQVFDDYSVIGTAVLEYITQQIAPKNLDNPSKKEQELIAKKTEKAKYLSLETIKLALEEFNKHRDIDKQCRFEEILANFAAIPMIFDEIAQNKDNLAQISIKYQNQGKKDLLQASAEDDVKAIKDLLDQTNNLLHKLKIFHISQSEDKANILDKDEHFYLVFEECYFELANIVPLYNKIRNYITQKPYSDEKFKLNFENSTLANGWDKNKEPDNTAILFIKDDKYYLGVMNKKNNKIFDDKAIKENKGEGYKKIVYKLLPGANKMLPKVFFSAKSIKFYNPSEDILRIRNHSTHTKNGSPQKGYEKFEFNIEDCRKFIDFYKQSISKHPEWKDFGFRFSDTQRYNSIDEFYREVENQGYKLTFENISESYIDSVVNQGKLYLFQIYNKDFSAYSKGRPNLHTLYWKALFDERNLQDVVYKLNGEAELFYRKQSIPKKITHPAKEAIANKNKDNPKKESVFEYDLIKDKRFTEDKFFFHCPITINFKSSGANKFNDEINLLLKEKANDVHILSIDRGERHLAYYTLVDGKGNIIKQDTFNIIGNDRMKTNYHDKLAAIEKDRDSARKDWKKINNIKEMKEGYLSQVVHEIAKLVIEYNAIVVFADLNFGFKRGRFKVEKQVYQKLEKMLIEKLNYLVFKDNEFDKTGGVLRAYQLTAPFETFKKMGKQTGIIYYVPAGFTSKICPVTGFVNQLYPKYESVSKSQEFFSKFDKICYNLDKGYFEFSFDYKNFGDKAAKGKWTIASFGSRLINFRNSDKNHNWDTREVYPTKELEKLLKDYSIEYGHGECIKAAICGESDKKFFAKLTSVLNTILQMRNSKTGTELDYLISPVADVNGNFFDSRQAPKNMPQDADANGAYHIGLKGLMLLGRIKNNQEGKKLNLVIKNEEYFEFVQNRNN

SEQ ID NO: 213 - protein, 1300 aa, Francisella novicida
  REGION 1..1300: note = MISC_FEATURE - Cpf1 D1255A polypeptide sequence
MSIYQEFVNKYSLSKTLRFELIPQGKTLENIKARGLILDDEKRAKDYKKAKQIIDKYHQFFIEEILSSVCISEDLLQNYSDVYFKLKKSDDDNLQKDFKSAKDTIKKQISEYIKDSEKFKNLFNQNLIDAKKGQESDLILWLKQSKDNGIELFKANSDITDIDEALEIIKSFKGWTTYFKGFHENRKNVYSSNDIPTSIIYRIVDDNLPKFLENKAKYESLKDKAPEAINYEQIKKDLAEELTFDIDYKTSEVNQRVFSLDEVFEIANFNNYLNQSGITKFNTIIGGKFVNGENTKRKGINEYINLYSQQINDKTLKKYKMSVLFKQILSDTESKSFVIDKLEDDSDVVTTMQSFYEQIAAFKTVEEKSIKETLSLLFDDLKAQKLDLSKIYFKNDKSLTDLSQQVFDDYSVIGTAVLEYITQQIAPKNLDNPSKKEQELIAKKTEKAKYLSLETIKLALEEFNKHRDIDKQCRFEEILANFAAIPMIFDEIAQNKDNLAQISIKYQNQGKKDLLQASAEDDVKAIKDLLDQTNNLLHKLKIFHISQSEDKANILDKDEHFYLVFEECYFELANIVPLYNKIRNYITQKPYSDEKFKLNFENSTLANGWDKNKEPDNTAILFIKDDKYYLGVMNKKNNKIFDDKAIKENKGEGYKKIVYKLLPGANKMLPKVFFSAKSIKFYNPSEDILRIRNHSTHTKNGSPQKGYEKFEFNIEDCRKFIDFYKQSISKHPEWKDFGFRFSDTQRYNSIDEFYREVENQGYKLTFENISESYIDSVVNQGKLYLFQIYNKDFSAYSKGRPNLHTLYWKALFDERNLQDVVYKLNGEAELFYRKQSIPKKITHPAKEAIANKNKDNPKKESVFEYDLIKDKRFTEDKFFFHCPITINFKSSGANKFNDEINLLLKEKANDVHILSIDRGERHLAYYTLVDGKGNIIKQDTFNIIGNDRMKTNYHDKLAAIEKDRDSARKDWKKINNIKEMKEGYLSQVVHEIAKLVIEYNAIVVFEDLNFGFKRGRFKVEKQVYQKLEKMLIEKLNYLVFKDNEFDKTGGVLRAYQLTAPFETFKKMGKQTGIIYYVPAGFTSKICPVTGFVNQLYPKYESVSKSQEFFSKFDKICYNLDKGYFEFSFDYKNFGDKAAKGKWTIASFGSRLINFRNSDKNHNWDTREVYPTKELEKLLKDYSIEYGHGECIKAAICGESDKKFFAKLTSVLNTILQMRNSKTGTELDYLISPVADVNGNFFDSRQAPKNMPQDAAANGAYHIGLKGLMLLGRIKNNQEGKKLNLVIKNEEYFEFVQNRNN

SEQ ID NO: 214 - protein, 1300 aa, Francisella novicida
  REGION 1..1300: note = MISC_FEATURE - Cpf1 D917A/E1006A polypeptide sequence
MSIYQEFVNKYSLSKTLRFELIPQGKTLENIKARGLILDDEKRAKDYKKAKQIIDKYHQFFIEEILSSVCISEDLLQNYSDVYFKLKKSDDDNLQKDFKSAKDTIKKQISEYIKDSEKFKNLFNQNLIDAKKGQESDLILWLKQSKDNGIELFKANSDITDIDEALEIIKSFKGWTTYFKGFHENRKNVYSSNDIPTSIIYRIVDDNLPKFLENKAKYESLKDKAPEAINYEQIKKDLAEELTFDIDYKTSEVNQRVFSLDEVFEIANFNNYLNQSGITKFNTIIGGKFVNGENTKRKGINEYINLYSQQINDKTLKKYKMSVLFKQILSDTESKSFVIDKLEDDSDVVTTMQSFYEQIAAFKTVEEKSIKETLSLLFDDLKAQKLDLSKIYFKNDKSLTDLSQQVFDDYSVIGTAVLEYITQQIAPKNLDNPSKKEQELIAKKTEKAKYLSLETIKLALEEFNKHRDIDKQCRFEEILANFAAIPMIFDEIAQNKDNLAQISIKYQNQGKKDLLQASAEDDVKAIKDLLDQTNNLLHKLKIFHISQSEDKANILDKDEHFYLVFEECYFELANIVPLYNKIRNYITQKPYSDEKFKLNFENSTLANGWDKNKEPDNTAILFIKDDKYYLGVMNKKNNKIFDDKAIKENKGEGYKKIVYKLLPGANKMLPKVFFSAKSIKFYNPSEDILRIRNHSTHTKNGSPQKGYEKFEFNIEDCRKFIDFYKQSISKHPEWKDFGFRFSDTQRYNSIDEFYREVENQGYKLTFENISESYIDSVVNQGKLYLFQIYNKDFSAYSKGRPNLHTLYWKALFDERNLQDVVYKLNGEAELFYRKQSIPKKITHPAKEAIANKNKDNPKKESVFEYDLIKDKRFTEDKFFFHCPITINFKSSGANKFNDEINLLLKEKANDVHILSIARGERHLAYYTLVDGKGNIIKQDTFNIIGNDRMKTNYHDKLAAIEKDRDSARKDWKKINNIKEMKEGYLSQVVHEIAKLVIEYNAIVVFADLNFGFKRGRFKVEKQVYQKLEKMLIEKLNYLVFKDNEFDKTGGVLRAYQLTAPFETFKKMGKQTGIIYYVPAGFTSKICPVTGFVNQLYPKYESVSKSQEFFSKFDKICYNLDKGYFEFSFDYKNFGDKAAKGKWTIASFGSRLINFRNSDKNHNWDTREVYPTKELEKLLKDYSIEYGHGECIKAAICGESDKKFFAKLTSVLNTILQMRNSKTGTELDYLISPVADVNGNFFDSRQAPKNMPQDADANGAYHIGLKGLMLLGRIKNNQEGKKLNLVIKNEEYFEFVQNRNN

SEQ ID NO: 215 - protein, 1300 aa, Francisella novicida
  REGION 1..1300: note = MISC_FEATURE - Cpf1 D917A/D1255A polypeptide sequence
MSIYQEFVNKYSLSKTLRFELIPQGKTLENIKARGLILDDEKRAKDYKKAKQIIDKYHQFFIEEILSSVCISEDLLQNYSDVYFKLKKSDDDNLQKDFKSAKDTIKKQISEYIKDSEKFKNLFNQNLIDAKKGQESDLILWLKQSKDNGIELFKANSDITDIDEALEIIKSFKGWTTYFKGFHENRKNVYSSNDIPTSIIYRIVDDNLPKFLENKAKYESLKDKAPEAINYEQIKKDLAEELTFDIDYKTSEVNQRVFSLDEVFEIANFNNYLNQSGITKFNTIIGGKFVNGENTKRKGINEYINLYSQQINDKTLKKYKMSVLFKQILSDTESKSFVIDKLEDDSDVVTTMQSFYEQIAAFKTVEEKSIKETLSLLFDDLKAQKLDLSKIYFKNDKSLTDLSQQVFDDYSVIGTAVLEYITQQIAPKNLDNPSKKEQELIAKKTEKAKYLSLETIKLALEEFNKHRDIDKQCRFEEILANFAAIPMIFDEIAQNKDNLAQISIKYQNQGKKDLLQASAEDDVKAIKDLLDQTNNLLHKLKIFHISQSEDKANILDKDEHFYLVFEECYFELANIVPLYNKIRNYITQKPYSDEKFKLNFENSTLANGWDKNKEPDNTAILFIKDDKYYLGVMNKKNNKIFDDKAIKENKGEGYKKIVYKLLPGANKMLPKVFFSAKSIKFYNPSEDILRIRNHSTHTKNGSPQKGYEKFEFNIEDCRKFIDFYKQSISKHPEWKDFGFRFSDTQRYNSIDEFYREVENQGYKLTFENISESYIDSVVNQGKLYLFQIYNKDFSAYSKGRPNLHTLYWKALFDERNLQDVVYKLNGEAELFYRKQSIPKKITHPAKEAIANKNKDNPKKESVFEYDLIKDKRFTEDKFFFHCPITINFKSSGANKFNDEINLLLKEKANDVHILSIARGERHLAYYTLVDGKGNIIKQDTFNIIGNDRMKTNYHDKLAAIEKDRDSARKDWKKINNIKEMKEGYLSQVVHEIAKLVIEYNAIVVFEDLNFGFKRGRFKVEKQVYQKLEKMLIEKLNYLVFKDNEFDKTGGVLRAYQLTAPFETFKKMGKQTGIIYYVPAGFTSKICPVTGFVNQLYPKYESVSKSQEFFSKFDKICYNLDKGYFEFSFDYKNFGDKAAKGKWTIASFGSRLINFRNSDKNHNWDTREVYPTKELEKLLKDYSIEYGHGECIKAAICGESDKKFFAKLTSVLNTILQMRNSKTGTELDYLISPVADVNGNFFDSRQAPKNMPQDAAANGAYHIGLKGLMLLGRIKNNQEGKKLNLVIKNEEYFEFVQNRNN

SEQ ID NO: 216 - protein, 1300 aa, Francisella novicida
  REGION 1..1300: note = MISC_FEATURE - Cpf1 E1006A/D1255A polypeptide sequence
MSIYQEFVNKYSLSKTLRFELIPQGKTLENIKARGLILDDEKRAKDYKKAKQIIDKYHQFFIEEILSSVCISEDLLQNYSDVYFKLKKSDDDNLQKDFKSAKDTIKKQISEYIKDSEKFKNLFNQNLIDAKKGQESDLILWLKQSKDNGIELFKANSDITDIDEALEIIKSFKGWTTYFKGFHENRKNVYSSNDIPTSIIYRIVDDNLPKFLENKAKYESLKDKAPEAINYEQIKKDLAEELTFDIDYKTSEVNQRVFSLDEVFEIANFNNYLNQSGITKFNTIIGGKFVNGENTKRKGINEYINLYSQQINDKTLKKYKMSVLFKQILSDTESKSFVIDKLEDDSDVVTTMQSFYEQIAAFKTVEEKSIKETLSLLFDDLKAQKLDLSKIYFKNDKSLTDLSQQVFDDYSVIGTAVLEYITQQIAPKNLDNPSKKEQELIAKKTEKAKYLSLETIKLALEEFNKHRDIDKQCRFEEILANFAAIPMIFDEIAQNKDNLAQISIKYQNQGKKDLLQASAEDDVKAIKDLLDQTNNLLHKLKIFHISQSEDKANILDKDEHFYLVFEECYFELANIVPLYNKIRNYITQKPYSDEKFKLNFENSTLANGWDKNKEPDNTAILFIKDDKYYLGVMNKKNNKIFDDKAIKENKGEGYKKIVYKLLPGANKMLPKVFFSAKSIKFYNPSEDILRIRNHSTHTKNGSPQKGYEKFEFNIEDCRKFIDFYKQSISKHPEWKDFGFRFSDTQRYNSIDEFYREVENQGYKLTFENISESYIDSVVNQGKLYLFQIYNKDFSAYSKGRPNLHTLYWKALFDERNLQDVVYKLNGEAELFYRKQSIPKKITHPAKEAIANKNKDNPKKESVFEYDLIKDKRFTEDKFFFHCPITINFKSSGANKFNDEINLLLKEKANDVHILSIDRGERHLAYYTLVDGKGNIIKQDTFNIIGNDRMKTNYHDKLAAIEKDRDSARKDWKKINNIKEMKEGYLSQVVHEIAKLVIEYNAIVVFADLNFGFKRGRFKVEKQVYQKLEKMLIEKLNYLVFKDNEFDKTGGVLRAYQLTAPFETFKKMGKQTGIIYYVPAGFTSKICPVTGFVNQLYPKYESVSKSQEFFSKFDKICYNLDKGYFEFSFDYKNFGDKAAKGKWTIASFGSRLINFRNSDKNHNWDTREVYPTKELEKLLKDYSIEYGHGECIKAAICGESDKKFFAKLTSVLNTILQMRNSKTGTELDYLISPVADVNGNFFDSRQAPKNMPQDAAANGAYHIGLKGLMLLGRIKNNQEGKKLNLVIKNEEYFEFVQNRNN

SEQ ID NO: 217 - protein, 1300 aa, Francisella novicida
  REGION 1..1300: note = MISC_FEATURE - Cpf1 D917A/E1006A/D1255A polypeptide sequence
MSIYQEFVNKYSLSKTLRFELIPQGKTLENIKARGLILDDEKRAKDYKKAKQIIDKYHQFFIEEILSSVCISEDLLQNYSDVYFKLKKSDDDNLQKDFKSAKDTIKKQISEYIKDSEKFKNLFNQNLIDAKKGQESDLILWLKQSKDNGIELFKANSDITDIDEALEIIKSFKGWTTYFKGFHENRKNVYSSNDIPTSIIYRIVDDNLPKFLENKAKYESLKDKAPEAINYEQIKKDLAEELTFDIDYKTSEVNQRVFSLDEVFEIANFNNYLNQSGITKFNTIIGGKFVNGENTKRKGINEYINLYSQQINDKTLKKYKMSVLFKQILSDTESKSFVIDKLEDDSDVVTTMQSFYEQIAAFKTVEEKSIKETLSLLFDDLKAQKLDLSKIYFKNDKSLTDLSQQVFDDYSVIGTAVLEYITQQIAPKNLDNPSKKEQELIAKKTEKAKYLSLETIKLALEEFNKHRDIDKQCRFEEILANFAAIPMIFDEIAQNKDNLAQISIKYQNQGKKDLLQASAEDDVKAIKDLLDQTNNLLHKLKIFHISQSEDKANILDKDEHFYLVFEECYFELANIVPLYNKIRNYITQKPYSDEKFKLNFENSTLANGWDKNKEPDNTAILFIKDDKYYLGVMNKKNNKIFDDKAIKENKGEGYKKIVYKLLPGANKMLPKVFFSAKSIKFYNPSEDILRIRNHSTHTKNGSPQKGYEKFEFNIEDCRKFIDFYKQSISKHPEWKDFGFRFSDTQRYNSIDEFYREVENQGYKLTFENISESYIDSVVNQGKLYLFQIYNKDFSAYSKGRPNLHTLYWKALFDERNLQDVVYKLNGEAELFYRKQSIPKKITHPAKEAIANKNKDNPKKESVFEYDLIKDKRFTEDKFFFHCPITINFKSSGANKFNDEINLLLKEKANDVHILSIARGERHLAYYTLVDGKGNIIKQDTFNIIGNDRMKTNYHDKLAAIEKDRDSARKDWKKINNIKEMKEGYLSQVVHEIAKLVIEYNAIVVFADLNFGFKRGRFKVEKQVYQKLEKMLIEKLNYLVFKDNEFDKTGGVLRAYQLTAPFETFKKMGKQTGIIYYVPAGFTSKICPVTGFVNQLYPKYESVSKSQEFFSKFDKICYNLDKGYFEFSFDYKNFGDKAAKGKWTIASFGSRLINFRNSDKNHNWDTREVYPTKELEKLLKDYSIEYGHGECIKAAICGESDKKFFAKLTSVLNTILQMRNSKTGTELDYLISPVADVNGNFFDSRQAPKNMPQDAAANGAYHIGLKGLMLLGRIKNNQEGKKLNLVIKNEEYFEFVQNRNN

SEQ ID NO: 218 - protein, 1052 aa, Staphylococcus aureus
  REGION 1..1052: note = MISC_FEATURE - Exemplary SaCas9 polypeptide sequence
KRNYILGLDIGITSVGYGIIDYETRDVIDAGVRLFKEANVENNEGRRSKRGARRLKRRRRHRIQRVKKLLFDYNLLTDHSELSGINPYEARVKGLSQKLSEEEFSAALLHLAKRRGVHNVNEVEEDTGNELSTKEQISRNSKALEEKYVAELQLERLKKDGEVRGSINRFKTSDYVKEAKQLLKVQKAYHQLDQSFIDTYIDLLETRRTYYEGPGEGSPFGWKDIKEWYEMLMGHCTYFPEELRSVKYAYNADLYNALNDLNNLVITRDENEKLEYYEKFQIIENVFKQKKKPTLKQIAKEILVNEEDIKGYRVTSTGKPEFTNLKVYHDIKDITARKEIIENAELLDQIAKILTIYQSSEDIQEELTNLNSELTQEEIEQISNLKGYTGTHNLSLKAINLILDELWHTNDNQIAIFNRLKLVPKKVDLSQQKEIPTTLVDDFILSPVVKRSFIQSIKVINAIIKKYGLPNDIIIELAREKNSKDAQKMINEMQKRNRQTNERIEEIIRTTGKENAKYLIEKIKLHDMQEGKCLYSLEAIPLEDLLNNPFNYEVDHIIPRSVSFDNSFNNKVLVKQEENSKKGNRTPFQYLSSSDSKISYETFKKHILNLAKGKGRISKTKKEYLLEERDINRFSVQKDFINRNLVDTRYATRGLMNLLRSYFRVNNLDVKVKSINGGFTSFLRRKWKFKKERNKGYKHHAEDALIIANADFIFKEWKKLDKAKKVMENQMFEEKQAESMPEIETEQEYKEIFITPHQIKHIKDFKDYKYSHRVDKKPNRELINDTLYSTRKDDKGNTLIVNNLNGLYDKDNDKLKKLINKSPEKLLMYHHDPQTYQKLKLIMEQYGDEKNPLYKYYEETGNYLTKYSKKDNGPVIKKIKYYGNKLNAHLDITDDYPNSRNKVVKLSLKPYRFDVYLDNGVYKFVTVKNLDVIKKENYYEVNSKCYEEAKKLKKISNQAEFIASFYNNDLIKINGELYRVIGVNNDLLNRIEVNMIDITYREYLENMNDKRPPRIIKTIASKTQSIKKYSTDILGNLYEVKSKKHPQIIKKG

SEQ ID NO: 219 - protein, 1052 aa, Staphylococcus aureus
  REGION 1..1052: note = MISC_FEATURE - SaCas9n polypeptide sequence
KRNYILGLDIGITSVGYGIIDYETRDVIDAGVRLFKEANVENNEGRRSKRGARRLKRRRRHRIQRVKKLLFDYNLLTDHSELSGINPYEARVKGLSQKLSEEEFSAALLHLAKRRGVHNVNEVEEDTGNELSTKEQISRNSKALEEKYVAELQLERLKKDGEVRGSINRFKTSDYVKEAKQLLKVQKAYHQLDQSFIDTYIDLLETRRTYYEGPGEGSPFGWKDIKEWYEMLMGHCTYFPEELRSVKYAYNADLYNALNDLNNLVITRDENEKLEYYEKFQIIENVFKQKKKPTLKQIAKEILVNEEDIKGYRVTSTGKPEFTNLKVYHDIKDITARKEIIENAELLDQIAKILTIYQSSEDIQEELTNLNSELTQEEIEQISNLKGYTGTHNLSLKAINLILDELWHTNDNQIAIFNRLKLVPKKVDLSQQKEIPTTLVDDFILSPVVKRSFIQSIKVINAIIKKYGLPNDIIIELAREKNSKDAQKMINEMQKRNRQTNERIEEIIRTTGKENAKYLIEKIKLHDMQEGKCLYSLEAIPLEDLLNNPFNYEVDHIIPRSVSFDNSFNNKVLVKQEEASKKGNRTPFQYLSSSDSKISYETFKKHILNLAKGKGRISKTKKEYLLEERDINRFSVQKDFINRNLVDTRYATRGLMNLLRSYFRVNNLDVKVKSINGGFTSFLRRKWKFKKERNKGYKHHAEDALIIANADFIFKEWKKLDKAKKVMENQMFEEKQAESMPEIETEQEYKEIFITPHQIKHIKDFKDYKYSHRVDKKPNRELINDTLYSTRKDDKGNTLIVNNLNGLYDKDNDKLKKLINKSPEKLLMYHHDPQTYQKLKLIMEQYGDEKNPLYKYYEETGNYLTKYSKKDNGPVIKKIKYYGNKLNAHLDITDDYPNSRNKVVKLSLKPYRFDVYLDNGVYKFVTVKNLDVIKKENYYEVNSKCYEEAKKLKKISNQAEFIASFYNNDLIKINGELYRVIGVNNDLLNRIEVNMIDITYREYLENMNDKRPPRIIKTIASKTQSIKKYSTDILGNLYEVKSKKHPQIIKKG

SEQ ID NO: 220 - protein, 1052 aa, Staphylococcus aureus
  REGION 1..1052: note = MISC_FEATURE - SaKKH Cas9 polypeptide sequence
KRNYILGLDIGITSVGYGIIDYETRDVIDAGVRLFKEANVENNEGRRSKRGARRLKRRRRHRIQRVKKLLFDYNLLTDHSELSGINPYEARVKGLSQKLSEEEFSAALLHLAKRRGVHNVNEVEEDTGNELSTKEQISRNSKALEEKYVAELQLERLKKDGEVRGSINRFKTSDYVKEAKQLLKVQKAYHQLDQSFIDTYIDLLETRRTYYEGPGEGSPFGWKDIKEWYEMLMGHCTYFPEELRSVKYAYNADLYNALNDLNNLVITRDENEKLEYYEKFQIIENVFKQKKKPTLKQIAKEILVNEEDIKGYRVTSTGKPEFTNLKVYHDIKDITARKEIIENAELLDQIAKILTIYQSSEDIQEELTNLNSELTQEEIEQISNLKGYTGTHNLSLKAINLILDELWHTNDNQIAIFNRLKLVPKKVDLSQQKEIPTTLVDDFILSPVVKRSFIQSIKVINAIIKKYGLPNDIIIELAREKNSKDAQKMINEMQKRNRQTNERIEEIIRTTGKENAKYLIEKIKLHDMQEGKCLYSLEAIPLEDLLNNPFNYEVDHIIPRSVSFDNSFNNKVLVKQEEASKKGNRTPFQYLSSSDSKISYETFKKHILNLAKGKGRISKTKKEYLLEERDINRFSVQKDFINRNLVDTRYATRGLMNLLRSYFRVNNLDVKVKSINGGFTSFLRRKWKFKKERNKGYKHHAEDALIIANADFIFKEWKKLDKAKKVMENQMFEEKQAESMPEIETEQEYKEIFITPHQIKHIKDFKDYKYSHRVDKKPNRKLINDTLYSTRKDDKGNTLIVNNLNGLYDKDNDKLKKLINKSPEKLLMYHHDPQTYQKLKLIMEQYGDEKNPLYKYYEETGNYLTKYSKKDNGPVIKKIKYYGNKLNAHLDITDDYPNSRNKVVKLSLKPYRFDVYLDNGVYKFVTVKNLDVIKKENYYEVNSKCYEEAKKLKKISNQAEFIASFYKNDLIKINGELYRVIGVNNDLLNRIEVNMIDITYREYLENMNDKRPPHIIKTIASKTQSIKKYSTDILGNLYEVKSKKHPQIIKKG

SEQ ID NO: 221 - protein, 707 aa, synthetic construct
  REGION 1..707: note = Casphi-1 polypeptide sequence
MADTPTLFTQFLRHHLPGQRFRKDILKQAGRILANKGEDATIAFLRGKSEESPPDFQPPVKCPIIACSRPLTEWPIYQASVAIQGYVYGQSLAEFEASDPGCSKDGLLGWFDKTGVCTDYFSVQGLNLIFQNARKRYIGVQTKVTNRNEKRHKKLKRINAKRIAEGLPELTSDEPESALDETGHLIDPPGLNTNIYCYQQVSPKPLALSEVNQLPTAYAGYSTSGDDPIQPMVTKDRLSISKGQPGYIPEHQRALLSQKKHRRMRGYGLKARALLVIVRIQDDWAVIDLRSLLRNAYWRRIVQTKEPSTITKLLKLVTGDPVLDATRMVATFTYKPGIVQVRSAKCLKNKQGSKLFSERYLNETVSVTSIDLGSNNLVAVATYRLVNGNTPELLQRFTLPSHLVKDFERYKQAHDTLEDSIQKTAVASLPQGQQTEIRMWSMYGFREAQERVCQELGLADGSIPWNVMTATSTILTDLFLARGGDPKKCMFTSEPKKKKNSKQVLYKIRDRAWAKMYRTLLSKETREAWNKALWGLKRGSPDYARLSKRKEELARRCVNYTISTAEKRAQCGRTIVALEDLNIGFFHGRGKQEPGWVGLFTRKKENRWLMQALHKAFLELAHHRGYHVIEVNPAYTSQTCPVCRHCDPDNRDQHNREAFHCIGCGFRGNADLDVATHNIAMVAITGESLKRARGSVASKTPQPLAAE

SEQ ID NO: 222 - protein, 757 aa, synthetic construct
  REGION 1..757: note = Casphi-2 polypeptide sequence
MPKPAVESEFSKVLKKHFPGERFRSSYMKRGGKILAAQGEEAVVAYLQGKSEEEPPNFQPPAKCHVVTKSRDFAEWPIMKASEAIQRYIYALSTTERAACKPGKSSESHAAWFAATGVSNHGYSHVQGLNLIFDHTLGRYDGVLKKVQLRNEKARARLESINASRADEGLPEIKAEEEEVATNETGHLLQPPGINPSFYVYQTISPQAYRPRDEIVLPPEYAGYVRDPNAPIPLGVVRNRCDIQKGCPGYIPEWQREAGTAISPKTGKAVTVPGLSPKKNKRMRRYWRSEKEKAQDALLVTVRIGTDWVVIDVRGLLRNARWRTIAPKDISLNALLDLFTGDPVIDVRRNIVTFTYTLDACGTYARKWTLKGKQTKATLDKLTATQTVALVAIDLGQTNPISAGISRVTQENGALQCEPLDRFTLPDDLLKDISAYRIAWDRNEEELRARSVEALPEAQQAEVRALDGVSKETARTQLCADFGLDPKRLPWDKMSSNTTFISEALLSNSVSRDQVFFTPAPKKGAKKKAPVEVMRKDRTWARAYKPRLSVEAQKLKNEALWALKRTSPEYLKLSRRKEELCRRSINYVIEKTRRRTQCQIVIPVIEDLNVRFFHGSGKRLPGWDNFFTAKKENRWFIQGLHKAFSDLRTHRSFYVFEVRPERTSITCPKCGHCEVGNRDGEAFQCLSCGKTCNADLDVATHNLTQVALTGKTMPKREEPRDAQGTAPARKTKKASKSKAPPAEREDQTPAQEPSQTS

SEQ ID NO: 223 - protein, 766 aa, synthetic construct
  REGION 1..766: note = Casphi-3 polypeptide sequence
MEKEITELTKIRREFPNKKFSSTDMKKAGKLLKAEGPDAVRDFLNSCQEIIGDFKPPVKTNIVSISRPFEEWPVSMVGRAIQEYYFSLTKEELESVHPGTSSEDHKSFFNITGLSNYNYTSVQGLNLIFKNAKAIYDGTLVKANNKNKKLEKKFNEINHKRSLEGLPIITPDFEEPFDENGHLNNPPGINRNIYGYQGCAAKVFVPSKHKMVSLPKEYEGYNRDPNLSLAGFRNRLEIPEGEPGHVPWFQRMDIPEGQIGHVNKIQRFNFVHGKNSGKVKFSDKTGRVKRYHHSKYKDATKPYKFLEESKKVSALDSILAIITIGDDWVVFDIRGLYRNVFYRELAQKGLTAVQLLDLFTGDPVIDPKKGVVTFSYKEGVVPVFSQKIVPRFKSRDTLEKLTSQGPVALLSVDLGQNEPVAARVCSLKNINDKITLDNSCRISFLDDYKKQIKDYRDSLDELEIKIRLEAINSLETNQQVEIRDLDVFSADRAKANTVDMFDIDPNLISWDSMSDARVSTQISDLYLKNGGDESRVYFEINNKRIKRSDYNISQLVRPKLSDSTRKNLNDSIWKLKRTSEEYLKLSKRKLELSRAVVNYTIRQSKLLSGINDIVIILEDLDVKKKFNGRGIRDIGWDNFFSSRKENRWFIPAFHKAFSELSSNRGLCVIEVNPAWTSATCPDCGFCSKENRDGINFTCRKCGVSYHADIDVATLNIARVAVLGKPMSGPADRERLGDTKKPRVARSRKTMKRKDISNSTVEAMVTA

SEQ ID NO: 224 - protein, 765 aa, synthetic construct
  REGION 1..765: note = Casphi-4 polypeptide sequence
MYSLEMADLKSEPSLLAKLLRDRFPGKYWLPKYWKLAEKKRLTGGEEAACEYMADKQLDSPPPNFRPPARCVILAKSRPFEDWPVHRVASKAQSFVIGLSEQGFAALRAAPPSTADARRDWLRSHGASEDDLMALEAQLLETIMGNAISLHGGVLKKIDNANVKAAKRLSGRNEARLNKGLQELPPEQEGSAYGADGLLVNPPGLNLNIYCRKSCCPKPVKNTARFVGHYPGYLRDSDSILISGTMDRLTIIEGMPGHIPAWQREQGLVKPGGRRRRLSGSESNMRQKVDPSTGPRRSTRSGTVNRSNQRTGRNGDPLLVEIRMKEDWVLLDARGLLRNLRWRESKRGLSCDHEDLSLSGLLALFSGDPVIDPVRNEVVFLYGEGIIPVRSTKPVGTRQSKKLLERQASMGPLTLISCDLGQTNLIAGRASAISLTHGSLGVRSSVRIELDPEIIKSFERLRKDADRLETEILTAAKETLSDEQRGEVNSHEKDSPQTAKASLCRELGLHPPSLPWGQMGPSTTFIADMLISHGRDDDAFLSHGEFPTLEKRKKFDKRFCLESRPLLSSETRKALNESLWEVKRTSSEYARLSQRKKEMARRAVNFVVEISRRKTGLSNVIVNIEDLNVRIFHGGGKQAPGWDGFFRPKSENRWFIQAIHKAFSDLAAHHGIPVIESDPQRTSMTCPECGHCDSKNRNGVRFLCKGCGASMDADFDAACRNLERVALTGKPMPKPSTSCERLLSATTGKVCSDHSLSHDAIEKAS

SEQ ID NO: 225 - protein, 793 aa, synthetic construct
  REGION 1..793: note = Casphi-5 polypeptide sequence
MSSLPTPLELLKQKHADLFKGLQFSSKDNKMAGKVLKKDGEEAALAFLSERGVSRGELPNFRPPAKTLVVAQSRPFEEFPIYRVSEAIQLYVYSLSVKELETVPSGSSTKKEHQRFFQDSSVPDFGYTSVQGLNKIFGLARGIYLGVITRGENQLQKAKSKHEALNKKRRASGEAETEFDPTPYEYMTPERKLAKPPGVNHSIMCYVDISVDEFDFRNPDGIVLPSEYAGYCREINTAIEKGTVDRLGHLKGGPGYIPGHQRKESTTEGPKINFRKGRIRRSYTALYAKRDSRRVRQGKLALPSYRHHMMRLNSNAESAILAVIFFGKDWVVFDLRGLLRNVRWRNLFVDGSTPSTLLGMFGDPVIDPKRGVVAFCYKEQIVPVVSKSITKMVKAPELLNKLYLKSEDPLVLVAIDLGQTNPVGVGVYRVMNASLDYEVVTRFALESELLREIESYRQRTNAFEAQIRAETFDAMTSEEQEEITRVRAFSASKAKENVCHRFGMPVDAVDWATMGSNTIHIAKWVMRHGDPSLVEVLEYRKDNEIKLDKNGVPKKVKLTDKRIANLTSIRLRFSQETSKHYNDTMWELRRKHPVYQKLSKSKADFSRRVVNSIIRRVNHLVPRARIVFIIEDLKNLGKVFHGSGKRELGWDSYFEPKSENRWFIQVLHKAFSETGKHKGYYIIECWPNWTSCTCPKCSCCDSENRHGEVFRCLACGYTCNTDFGTAPDNLVKIATTGKGLPGPKKRCKGSSKGKNPKIARSSETGVSVTESGAPKVKKSSPTQTSQSSSQSAP

SEQ ID NO: 226 - protein, 441 aa, synthetic construct
  REGION 1..441: note = Casphi-6 polypeptide sequence
MNKIEKEKTPLAKLMNENFAGLRFPFAIIKQAGKKLLKEGELKTIEYMTGKGSIEPLPNFKPPVKCLIVAKRRDLKYFPICKASCEIQSYVYSLNYKDFMDYFSTPMTSQKQHEEFFKKSGLNIEYQNVAGLNLIFNNVKNTYNGVILKVKNRNEKLKKKAIKNNYEFEEIKTFNDDGCLINKPGINNVIYCFQSISPKILKNITHLPKEYNDYDCSVDRNIIQKYVSRLDIPESQPGHVPEWQRKLPEFNNTNNPRRRRKWYSNGRNISKGYSVDQVNQAKIEDSLLAQIKIGEDWIILDIRGLLRDLNRRELISYKNKLTIKDVLGFFSDYPIIDIKKNLVTFCYKEGVIQVVSQKSIGNKKSKQLLEKLIENKPIALVSIDLGQTNPVSVKISKLNKINNKISIESFTYRFLNEEILKEIEKYRKDYDKLELKLINEA

SEQ ID NO: 227 - protein, 772 aa, synthetic construct
  REGION 1..772: note = Casphi-7 polypeptide sequence
MSNTAVSTREHMSNKTTPPSPLSLLLRAHFPGLKFESQDYKIAGKKLRDGGPEAVISYLTGKGQAKLKDVKPPAKAFVIAQSRPFIEWDLVRVSRQIQEKIFGIPATKGRPKQDGLSETAFNEAVASLEVDGKSKLNEETRAAFYEVLGLDAPSLHAQAQNALIKSAISIREGVLKKVENRNEKNLSKTKRRKEAGEEATFVEEKAHDERGYLIHPPGVNQTIPGYQAVVIKSCPSDFIGLPSGCLAKESAEALTDYLPHDRMTIPKGQPGYVPEWQHPLLNRRKNRRRRDWYSASLNKPKATCSKRSGTPNRKNSRTDQIQSGRFKGAIPVLMRFQDEWVIIDIRGLLRNARYRKLLKEKSTIPDLLSLFTGDPSIDMRQGVCTFIYKAGQACSAKMVKTKNAPEILSELTKSGPVVLVSIDLGQTNPIAAKVSRVTQLSDGQLSHETLLRELLSNDSSDGKEIARYRVASDRLRDKLANLAVERLSPEHKSEILRAKNDTPALCKARVCAALGLNPEMIAWDKMTPYTEFLATAYLEKGGDRKVATLKPKNRPEMLRRDIKFKGTEGVRIEVSPEAAEAYREAQWDLQRTSPEYLRLSTWKQELTKRILNQLRHKAAKSSQCEVVVMAFEDLNIKMMHGNGKWADGGWDAFFIKKRENRWFMQAFHKSLTELGAHKGVPTIEVTPHRTSITCTKCGHCDKANRDGERFACQKCGFVAHADLEIATDNIERVALTGKPMPKPESERSGDAKKSVGARKAAFKPEEDAEAAE

SEQ ID NO: 228 - protein, 717 aa, synthetic construct
  REGION 1..717: note = Casphi-8 polypeptide sequence
MIKPTVSQFLTPGFKLIRNHSRTAGLKLKNEGEEACKKFVRENEIPKDECPNFQGGPAIANIIAKSREFTEWEIYQSSLAIQEVIFTLPKDKLPEPILKEEWRAQWLSEHGLDTVPYKEAAGLNLIIKNAVNTYKGVQVKVDNKNKNNLAKINRKNEIAKLNGEQEISFEEIKAFDDKGYLLQKPSPNKSIYCYQSVSPKPFITSKYHNVNLPEEYIGYYRKSNEPIVSPYQFDRLRIPIGEPGYVPKWQYTFLSKKENKRRKLSKRIKNVSPILGIICIKKDWCVFDMRGLLRTNHWKKYHKPTDSINDLFDYFTGDPVIDTKANVVRFRYKMENGIVNYKPVREKKGKELLENICDQNGSCKLATVDVGQNNPVAIGLFELKKVNGELTKTLISRHPTPIDFCNKITAYRERYDKLESSIKLDAIKQLTSEQKIEVDNYNNNFTPQNTKQIVCSKLNINPNDLPWDKMISGTHFISEKAQVSNKSEIYFTSTDKGKTKDVMKSDYKWFQDYKPKLSKEVRDALSDIEWRLRRESLEFNKLSKSREQDARQLANWISSMCDVIGIENLVKKNNFFGGSGKREPGWDNFYKPKKENRWWINAIHKALTELSQNKGKRVILLPAMRTSITCPKCKYCDSKNRNGEKFNCLKCGIELNADIDVATENLATVAITAQSMPKPTCERSGDAKKPVRARKAKAPEFHDKLAPSYTVVLREAV

SEQ ID NO: 229 - protein, 793 aa, synthetic construct
  REGION 1..793: note = Casphi-9 polypeptide sequence
MRSSREIGDKILMRQPAEKTAFQVFRQEVIGTQKLSGGDAKTAGRLYKQGKMEAAREWLLKGARDDVPPNFQPPAKCLVVAVSHPFEEWDISKTNHDVQAYIYAQPLQAEGHLNGLSEKWEDTSADQHKLWFEKTGVPDRGLPVQAINKIAKAAVNRAFGVVRKVENRNEKRRSRDNRIAEHNRENGLTEVVREAPEVATNADGFLLHPPGIDPSILSYASVSPVPYNSSKHSFVRLPEEYQAYNVEPDAPIPQFVVEDRFAIPPGQPGYVPEWQRLKCSTNKHRRMRQWSNQDYKPKAGRRAKPLEFQAHLTRERAKGALLVVMRIKEDWVVFDVRGLLRNVEWRKVLSEEAREKLTLKGLLDLFTGDPVIDTKRGIVTFLYKAEITKILSKRTVKTKNARDLLLRLTEPGEDGLRREVGLVAVDLGQTHPIAAAIYRIGRTSAGALESTVLHRQGLREDQKEKLKEYRKRHTALDSRLRKEAFETLSVEQQKEIVTVSGSGAQITKDKVCNYLGVDPSTLPWEKMGSYTHFISDDFLRRGGDPNIVHFDRQPKKGKVSKKSQRIKRSDSQWVGRMRPRLSQETAKARMEADWAAQNENEEYKRLARSKQELARWCVNTLLQNTRCITQCDEIVVVIEDLNVKSLHGKGAREPGWDNFFTPKTENRWFIQILHKTFSELPKHRGEHVIEGCPLRTSITCPACSYCDKNSRNGEKFVCVACGATFHADFEVATYNLVRLATTGMPMPKSLERQGGGEKAGGARKARKKAKQVEKIVVQANANVTMNGASLHSP

SEQ ID NO: 230 - protein, 812 aa, synthetic construct
  REGION 1..812: note = Casphi-10 polypeptide sequence
MDMLDTETNYATETPAQQQDYSPKPPKKAQRAPKGFSKKARPEKKPPKPITLFTQKHFSGVRFLKRVIRDASKILKLSESRTITFLEQAIERDGSAPPDVTPPVHNTIMAVTRPFEEWPEVILSKALQKHCYALTKKIKIKTWPKKGPGKKCLAAWSARTKIPLIPGQVQATNGLFDRIGSIYDGVEKKVTNRNANKKLEYDEAIKEGRNPAVPEYETAYNIDGTLINKPGYNPNLYITQSRTPRLITEADRPLVEKILWQMVEKKTQSRNQARRARLEKAAHLQGLPVPKFVPEKVDRSQKIEIRIIDPLDKIEPYMPQDRMAIKASQDGHVPYWQRPFLSKRRNRRVRAGWGKQVSSIQAWLTGALLVIVRLGNEAFLADIRGALRNAQWRKLLKPDATYQSLFNLFTGDPVVNTRTNHLTMAYREGVVNIVKSRSFKGRQTREHLLTLLGQGKTVAGVSFDLGQKHAAGLLAAHFGLGEDGNPVFTPIQACFLPQRYLDSLTNYRNRYDALTLDMRRQSLLALTPAQQQEFADAQRDPGGQAKRACCLKLNLNPDEIRWDLVSGISTMISDLYIERGGDPRDVHQQVETKPKGKRKSEIRILKIRDGKWAYDFRPKIADETRKAQREQLWKLQKASSEFERLSRYKINIARAIANWALQWGRELSGCDIVIPVLEDLNVGSKFFDGKGKWLLGWDNRFTPKKENRWFIKVLHKAVAELAPHRGVPVYEVMPHRTSMTCPACHYCHPTNREGDRFECQSCHVVKNTDRDVAPYNILRVAVEGKTLDRWQAEKKPQAEPDRPMILIDNQES

SEQ ID NO: 231 - protein, 84 aa, synthetic construct
  REGION 1..84: note = synthetic polypeptide sequence
MTNLSDIIEKETGKQLVIQESILMLPEEVEEVIGNKPESDILVHTAYDESTDENVMLLTSDAPEYKPWALVIQDSNGENKIKML

SEQ ID NO: 232 - protein, 1129 aa, Alicyclobacillus acidoterrestris
  REGION 1..1129: note = MISC_FEATURE - Cas12b/C2c1; sp|T0D7A2|C2C1_ALIAG CRISPR-associated endonuclease C2c1 OS = Alicyclobacillus acido-terrestris (strain ATCC 49025 /DSM 3922/ CIP 106132 / NCIMB 13137/GD3B) GN=c2c1 PE=1 SV=1; Cas12b/C2c1 polypeptide sequence
MAVKSIKVKLRLDDMPEIRAGLWKLHKEVNAGVRYYTEWLSLLRQENLYRRSPNGDGEQECDKTAEECKAELLERLRARQVENGHRGPAGSDDELLQLARQLYELLVPQAIGAKGDAQQIARKFLSPLADKDAVGGLGIAKAGNKPRWVRMREAGEPGWEEEKEKAETRKSADRTADVLRALADFGLKPLMRVYTDSEMSSVEWKPLRKGQAVRTWDRDMFQQAIERMMSWESWNQRVGQEYAKLVEQKNRFEQKNFVGQEHLVHLVNQLQQDMKEASPGLESKEQTAHYVTGRALRGSDKVFEKWGKLAPDAPFDLYDAEIKNVQRRNTRRFGSHDLFAKLAEPEYQALWREDASFLTRYAVYNSILRKLNHAKMFATFTLPDATAHPIWTRFDKLGGNLHQYTFLFNEFGERRHAIRFHKLLKVENGVAREVDDVTVPISMSEQLDNLLPRDPNEPIALYFRDYGAEQHFTGEFGGAKIQCRRDQLAHMHRRRGARDVYLNVSVRVQSQSEARGERRPPYAAVFRLVGDNHRAFVHFDKLSDYLAEHPDDGKLGSEGLLSGLRVMSVDLGLRTSASISVFRVARKDELKPNSKGRVPFFFPIKGNDNLVAVHERSQLLKLPGETESKDLRAIREERQRTLRQLRTQLAYLRLLVRCGSEDVGRRERSWAKLIEQPVDAANHMTPDWREAFENELQKLKSLHGICSDKEWMDAVYESVRRVWRHMGKQVRDWRKDVRSGERPKIRGYAKDVVGGNSIEQIEYLERQYKFLKSWSFFGKVSGQVIRAEKGSRFAITLREHIDHAKEDRLKKLADRIIMEALGYVYALDERGKGKWVAKYPPCQLILLEELSEYQFNNDRPPSENNQLMQWSHRGVFQELINQAQVHDLLVGTMYAAFSSRFDARTGAPGIRCRRVPARCTQEHNPEPFPWWLNKFVVEHTLDACPLRADDLIPTGEGEIFVSPFSAEEGDFHQIHADLNAAQNLQQRLWSDFDISQIRLRCDWGEVDGELVLIPRLTGKRTADSYSNKVFYTNTGVTYYERERGKKRRKVFAQEKLSEEEAELLVEADEAREKSVVLMRDPSGIINRGNWTRQKEFWSMVNQRIEGYLVKQIRSRVPLQDSACENTGDI

SEQ ID NO: 233 - protein, 1368 aa, Mus musculus
  REGION 1..1368: note = MISC_FEATURE - high fidelity Cas9 polypeptide sequence
MDKKYSIGLAIGTNSVGWAVITDEYKVPSKKFKVLGNTDRHSIKKNLIGALLFDSGETAEATRLKRTARRRYTRRKNRICYLQEIFSNEMAKVDDSFFHRLEESFLVEEDKKHERHPIFGNIVDEVAYHEKYPTIYHLRKKLVDSTDKADLRLIYLALAHMIKFRGHFLIEGDLNPDNSDVDKLFIQLVQTYNQLFEENPINASGVDAKAILSARLSKSRRLENLIAQLPGEKKNGLFGNLIALSLGLTPNFKSNFDLAEDAKLQLSKDTYDDDLDNLLAQIGDQYADLFLAAKNLSDAILLSDILRVNTEITKAPLSASMIKRYDEHHQDLTLLKALVRQQLPEKYKEIFFDQSKNGYAGYIDGGASQEEFYKFIKPILEKMDGTEELLVKLNREDLLRKQRTFDNGSIPHQIHLGELHAILRRQEDFYPFLKDNREKIEKILTFRIPYYVGPLARGNSRFAWMTRKSEETITPWNFEEVVDKGASAQSFIERMTAFDKNLPNEKVLPKHSLLYEYFTVYNELTKVKYVTEGMRKPAFLSGEQKKAIVDLLFKTNRKVTVKQLKEDYFKKIECFDSVEISGVEDRFNASLGTYHDLLKIIKDKDFLDNEENEDILEDIVLTLTLFEDREMIEERLKTYAHLFDDKVMKQLKRRRYTGWGALSRKLINGIRDKQSGKTILDFLKSDGFANRNFMALIHDDSLTFKEDIQKAQVSGQGDSLHEHIANLAGSPAIKKGILQTVKVVDELVKVMGRHKPENIVIEMARENQTTQKGQKNSRERMKRIEEGIKELGSQILKEHPVENTQLQNEKLYLYYLQNGRDMYVDQELDINRLSDYDVDHIVPQSFLKDDSIDNKVLTRSDKNRGKSDNVPSEEVVKKMKNYWRQLLNAKLITQRKFDNLTKAERGGLSELDKAGFIKRQLVETRAITKHVAQILDSRMNTKYDENDKLIREVKVITLKSKLVSDFRKDFQFYKVREINNYHHAHDAYLNAVVGTALIKKYPKLESEFVYGDYKVYDVRKMIAKSEQEIGKATAKYFFYSNIMNFFKTEITLANGEIRKRPLIETNGETGEIVWDKGRDFATVRKVLSMPQVNIVKKTEVQTGGFSKESILPKRNSDKLIARKKDWDPKKYGGFDSPTVAYSVLVVAKVEKGKSKKLKSVKELLGITIMERSSFEKNPIDFLEAKGYKEVKKDLIIKLPKYSLFELENGRKRMLASAGELQKGNELALPSKYVNFLYLASHYEKLKGSPEDNEQKQLFVEQHKHYLDEIIEQISEFSKRVILADANLDKVLSAYNKHRDKPIREQAENIIHLFTLTNLGAPAAFKYFDTTIDRKRYTSTKEVLDATLIHQSITGLYETRIDLSQLGGD

SEQ ID NO: 234 - protein, 1368 aa, Streptococcus pyogenes
  REGION 1..1368: note = MISC_FEATURE - PAM-binding SpEQR Cas9 polypeptide sequence
MDKKYSIGLAIGTNSVGWAVITDEYKVPSKKFKVLGNTDRHSIKKNLIGALLFDSGETAEATRLKRTARRRYTRRKNRICYLQEIFSNEMAKVDDSFFHRLEESVLVEEDKKHERHPIFGNIVDEVAYHEKYPTIYHLRKKLVDSTDKADLRLIYLALAHMIKFRGHFLIEGDLNPDNSDVDKLFIQLVQTYNQLFEENPINASGVDAKAILSARLSKSRRLENLIAQLPGEKKNGLFGNLIALSLGLTPNFKSNFDLAEDAKLQLSKDTYDDDLDNLLAQIGDQYADLFLAAKNLSDAILLSDILRVNTEITKAPLSASMIKRYDEHHQDLTLLKALVRQQLPEKYKEIFFDQSKNGYAGYIDGGASQEEFYKFIKPILEKMDGTEELLVKLNREDLLRKQRTFDNGSIPHQIHLGELHAILRRQEDFYPFLKDNREKIEKILTFRIPYYVGPLARGNSRFAWMTRKSEETITPWNFEEVVDKGASAQSFIERMTNFDKNLPNEKVLPKHSLLYEYFTVYNELTKVKYVTEGMRKPAFLSGEQKKAIVDLLFKTNRKVTVKQLKEDYFKKIECFDSVEISGVEDRFNASLGTYHDLLKIIKDKDFLDNEENEDILEDIVLTLTLFEDREMIEERLKTYAHLFDDKVMKQLKRRRYTGWGRLSRKLINGIRDKQSGKTILDFLKSDGFANRNFMQLIHDDSLTFKEDIQKAQVSGQGDSLHEHIANLAGSPAIKKGILQTVKVVDELVKVMGRHKPENIVIEMARENQTTQKGQKNSRERMKRIEEGIKELGSQILKEHPVENTQLQNEKLYLYYLQNGRDMYVDQELDINRLSDYDVDHIVPQSFLKDDSIDNKVLTRSDKNRGKSDNVPSEEVVKKMKNYWRQLLNAKLITQRKFDNLTKAERGGLSELDKAGFIKRQLVETRQITKHVAQILDSRMNTKYDENDKLIREVKVITLKSKLVSDFRKDFQFYKVREINNYHHAHDAYLNAVVGTALIKKYPKLESEFVYGDYKVYDVRKMIAKSEQEIGKATAKYFFYSNIMNFFKTEITLANGEIRKRPLIETNGETGEIVWDKGRDFATVRKVLSMPQVNIVKKTEVQTGGFSKESILPKRNSDKLIARKKDWDPKKYGGFESPTVAYSVLVVAKVEKGKSKKLKSVKELLGITIMERSSFEKNPIDFLEAKGYKEVKKDLIIKLPKYSLFELENGRKRMLASAGELQKGNELALPSKYVNFLYLASHYEKLKGSPEDNEQKQLFVEQHKHYLDEIIEQISEFSKRVILADANLDKVLSAYNKHRDKPIREQAENIIHLFTLTNLGAPAAFKYFDTTIDRKQYRSTKEVLDATLIHQSITGLYETRIDLSQLGGD

SEQ ID NO: 235 - protein, 1368 aa, Streptococcus pyogenes
  REGION 1..1368: note = MISC_FEATURE - PAM-binding SpVQR Cas9 polypeptide sequence
MDKKYSIGLAIGTNSVGWAVITDEYKVPSKKFKVLGNTDRHSIKKNLIGALLFDSGETAEATRLKRTARRRYTRRKNRICYLQEIFSNEMAKVDDSFFHRLEESFLVEEDKKHERHPIFGNIVDEVAYHEKYPTIYHLRKKLVDSTDKADLRLIYLALAHMIKFRGHFLIEGDLNPDNSDVDKLFIQLVQTYNQLFEENPINASGVDAKAILSARLSKSRRLENLIAQLPGEKKNGLFGNLIALSLGLTPNFKSNFDLAEDAKLQLSKDTYDDDLDNLLAQIGDQYADLFLAAKNLSDAILLSDILRVNTEITKAPLSASMIKRYDEHHQDLTLLKALVRQQLPEKYKEIFFDQSKNGYAGYIDGGASQEEFYKFIKPILEKMDGTEELLVKLNREDLLRKQRTFDNGSIPHQIHLGELHAILRRQEDFYPFLKDNREKIEKILTFRIPYYVGPLARGNSRFAWMTRKSEETITPWNFEEVVDKGASAQSFIERMTNFDKNLPNEKVLPKHSLLYEYFTVYNELTKVKYVTEGMRKPAFLSGEQKKAIVDLLFKTNRKVTVKQLKEDYFKKIECFDSVEISGVEDRFNASLGTYHDLLKIIKDKDFLDNEENEDILEDIVLTLTLFEDREMIEERLKTYAHLFDDKVMKQLKRRRYTGWGRLSRKLINGIRDKQSGKTILDFLKSDGFANRNFMQLIHDDSLTFKEDIQKAQVSGQGDSLHEHIANLAGSPAIKKGILQTVKVVDELVKVMGRHKPENIVIEMARENQTTQKGQKNSRERMKRIEEGIKELGSQILKEHPVENTQLQNEKLYLYYLQNGRDMYVDQELDINRLSDYDVDHIVPQSFLKDDSIDNKVLTRSDKNRGKSDNVPSEEVVKKMKNYWRQLLNAKLITQRKFDNLTKAERGGLSELDKAGFIKRQLVETRQITKHVAQILDSRMNTKYDENDKLIREVKVITLKSKLVSDFRKDFQFYKVREINNYHHAHDAYLNAVVGTALIKKYPKLESEFVYGDYKVYDVRKMIAKSEQEIGKATAKYFFYSNIMNFFKTEITLANGEIRKRPLIETNGETGEIVWDKGRDFATVRKVLSMPQVNIVKKTEVQTGGFSKESILPKRNSDKLIARKKDWDPKKYGGFVSPTVAYSVLVVAKVEKGKSKKLKSVKELLGITIMERSSFEKNPIDFLEAKGYKEVKKDLIIKLPKYSLFELENGRKRMLASAGELQKGNELALPSKYVNFLYLASHYEKLKGSPEDNEQKQLFVEQHKHYLDEIIEQISEFSKRVILADANLDKVLSAYNKHRDKPIREQAENIIHLFTLTNLGAPAAFKYFDTTIDRKQYRSTKEVLDATLIHQSITGLYETRIDLSQLGGD

SEQ ID NO: 236 - protein, 1368 aa, Streptococcus pyogenes
  REGION 1..1368: note = MISC_FEATURE - SpVQR Cas9 polypeptide sequence
MDKKYSIGLAIGTNSVGWAVITDEYKVPSKKFKVLGNTDRHSIKKNLIGALLFDSGETAEATRLKRTARRRYTRRKNRICYLQEIFSNEMAKVDDSFFHRLEESFLVEEDKKHERHPIFGNIVDEVAYHEKYPTIYHLRKKLVDSTDKADLRLIYLALAHMIKFRGHFLIEGDLNPDNSDVDKLFIQLVQTYNQLFEENPINASGVDAKAILSARLSKSRRLENLIAQLPGEKKNGLFGNLIALSLGLTPNFKSNFDLAEDAKLQLSKDTYDDDLDNLLAQIGDQYADLFLAAKNLSDAILLSDILRVNTEITKAPLSASMIKRYDEHHQDLTLLKALVRQQLPEKYKEIFFDQSKNGYAGYIDGGASQEEFYKFIKPILEKMDGTEELLVKLNREDLLRKQRTFDNGSIPHQIHLGELHAILRRQEDFYPFLKDNREKIEKILTFRIPYYVGPLARGNSRFAWMTRKSEETITPWNFEEVVDKGASAQSFIERMTNFDKNLPNEKVLPKHSLLYEYFTVYNELTKVKYVTEGMRKPAFLSGEQKKAIVDLLFKTNRKVTVKQLKEDYFKKIECFDSVEISGVEDRFNASLGTYHDLLKIIKDKDFLDNEENEDILEDIVLTLTLFEDREMIEERLKTYAHLFDDKVMKQLKRRRYTGWGRLSRKLINGIRDKQSGKTILDFLKSDGFANRNFMQLIHDDSLTFKEDIQKAQVSGQGDSLHEHIANLAGSPAIKKGILQTVKVVDELVKVMGRHKPENIVIEMARENQTTQKGQKNSRERMKRIEEGIKELGSQILKEHPVENTQLQNEKLYLYYLQNGRDMYVDQELDINRLSDYDVDHIVPQSFLKDDSIDNKVLTRSDKNRGKSDNVPSEEVVKKMKNYWRQLLNAKLITQRKFDNLTKAERGGLSELDKAGFIKRQLVETRQITKHVAQILDSRMNTKYDENDKLIREVKVITLKSKLVSDFRKDFQFYKVREINNYHHAHDAYLNAVVGTALIKKYPKLESEFVYGDYKVYDVRKMIAKSEQEIGKATAKYFFYSNIMNFFKTEITLANGEIRKRPLIETNGETGEIVWDKGRDFATVRKVLSMPQVNIVKKTEVQTGGFSKESILPKRNSDKLIARKKDWDPKKYGGFVSPTVAYSVLVVAKVEKGKSKKLKSVKELLGITIMERSSFEKNPIDFLEAKGYKEVKKDLIIKLPKYSLFELENGRKRMLASARELQKGNELALPSKYVNFLYLASHYEKLKGSPEDNEQKQLFVEQHKHYLDEIIEQISEFSKRVILADANLDKVLSAYNKHRDKPIREQAENIIHLFTLTNLGAPAAFKYFDTTIDRKEYRSTKEVLDATLIHQSITGLYETRIDLSQLGGD

SEQ ID NO: 237 - protein, 1359 aa, Streptococcus macacae
  REGION 1..1359: note = MISC_FEATURE - SpyMacCas9 polypeptide sequence
MDKKYSIGLDIGTNSVGWAVITDDYKVPSKKFKVLGNTDRHSIKKNLIGALLFGSGETAEATRLKRTARRRYTRRKNRICYLQEIFSNEMAKVDDSFFHRLEESFLVEEDKKHERHPIFGNIVDEVAYHEKYPTIYHLRKKLADSTDKADLRLIYLALAHMIKFRGHFLIEGDLNPDNSDVDKLFIQLVQIYNQLFEENPINASRVDAKAILSARLSKSRRLENLIAQLPGEKRNGLFGNLIALSLGLTPNFKSNFDLAEDAKLQLSKDTYDDDLDNLLAQIGDQYADLFLAAKNLSDAILLSDILRVNSEITKAPLSASMIKRYDEHHQDLTLLKALVRQQLPEKYKEIFFDQSKNGYAGYIDGGASQEEFYKFIKPILEKMDGTEELLVKLNREDLLRKQRTFDNGSIPHQIHLGELHAILRRQEDFYPFLKDNREKIEKILTFRIPYYVGPLARGNSRFAWMTRKSEETITPWNFEEVVDKGASAQSFIERMTNFDKNLPNEKVLPKHSLLYEYFTVYNELTKVKYVTEGMRKPAFLSGEQKKAIVDLLFKTNRKVTVKQLKEDYFKKIECFDSVEISGVEDRFNASLGAYHDLLKIIKDKDFLDNEENEDILEDIVLTLTLFEDRGMIEERLKTYAHLFDDKVMKQLKRRRYTGWGRLSRKLINGIRDKQSGKTILDFLKSDGFANRNFMQLIHDDSLTFKEDIQKAQVSGQGHSLHEQIANLAGSPAIKKGILQTVKIVDELVKVMGHKPENIVIEMARENQTTQKGQKNSRERMKRIEEGIKELGSQILKEHPVENTQLQNEKLYLYYLQNGRDMYVDQELDINRLSDYDVDHIVPQSFIKDDSIDNKVLTRSDKNRGKSDNVPSEEVVKKMKNYWRQLLNAKLITQRKFDNLTKAERGGLSELDKAGFIKRQLVETRQITKHVAQILDSRMNTKYDENDKLIREVKVITLKSKLVSDFRKDFQFYKVREINNYHHAHDAYLNAVVGTALIKKYPKLESEFVYGDYKVYDVRKMIAKSEQEIGKATAKYFFYSNIMNFFKTEITLANGEIRKRPLIETNGETGEIVWDKGRDFATVRKVLSMPQVNIVKKTEIQTVGQNGGLFDDNPKSPLEVTPSKLVPLKKELNPKKYGGYQKPTTAYPVLLITDTKQLIPISVMNKKQFEQNPVKFLRDRGYQQVGKNDFIKLPKYTLVDIGDGIKRLWASSKEIHKGNQLVVSKKSQILLYHAHHLDSDLSNDYLQNHNQQFDVLFNEIISFSKKCKLGKEHIQKIENVYSNKKNSASIEELAESFIKLLGFTQLGATSPFNFLGVKLNQKQYKGKKDYILPCTEGTLIRQSITGLYETRVDLSKIGED

SEQ ID NO: 238 - protein, 1410 aa, synthetic construct
  REGION 1..1410: note = CP5 polypeptide sequence
  REGION 1..341: note = MISC_FEATURE - Sequence derived from Cas9
  REGION 342..362: note = MISC_FEATURE - Linker sequence
  REGION 363..1388: note = MISC_FEATURE - Sequence derived from Cas9
  REGION 1389..1410: note = MISC_FEATURE - Bipartite nuclear localization sequence
EIGKATAKYFFYSNIMNFFKTEITLANGEIRKRPLIETNGETGEIVWDKGRDFATVRKVLSMPQVNIVKKTEVQTGGFSKESILPKRNSDKLIARKKDWDPKKYGGFMQPTVAYSVLVVAKVEKGKSKKLKSVKELLGITIMERSSFEKNPIDFLEAKGYKEVKKDLIIKLPKYSLFELENGRKRMLASAKFLQKGNELALPSKYVNFLYLASHYEKLKGSPEDNEQKQLFVEQHKHYLDEIIEQISEFSKRVILADANLDKVLSAYNKHRDKPIREQAENIIHLFTLTNLGAPRAFKYFDTTIARKEYRSTKEVLDATLIHQSITGLYETRIDLSQLGGDGGSGGSGGSGGSGGSGGSGGMDKKYSIGLAIGTNSVGWAVITDEYKVPSKKFKVLGNTDRHSIKKNLIGALLFDSGETAEATRLKRTARRRYTRRKNRICYLQEIFSNEMAKVDDSFFHRLEESFLVEEDKKHERHPIFGNIVDEVAYHEKYPTIYHLRKKLVDSTDKADLRLIYLALAHMIKFRGHFLIEGDLNPDNSDVDKLFIQLVQTYNQLFEENPINASGVDAKAILSARLSKSRRLENLIAQLPGEKKNGLFGNLIALSLGLTPNFKSNFDLAEDAKLQLSKDTYDDDLDNLLAQIGDQYADLFLAAKNLSDAILLSDILRVNTEITKAPLSASMIKRYDEHHQDLTLLKALVRQQLPEKYKEIFFDQSKNGYAGYIDGGASQEEFYKFIKPILEKMDGTEELLVKLNREDLLRKQRTFDNGSIPHQIHLGELHAILRRQEDFYPFLKDNREKIEKILTFRIPYYVGPLARGNSRFAWMTRKSEETITPWNFEEVVDKGASAQSFIERMTNFDKNLPNEKVLPKHSLLYEYFTVYNELTKVKYVTEGMRKPAFLSGEQKKAIVDLLFKTNRKVTVKQLKEDYFKKIECFDSVEISGVEDRFNASLGTYHDLLKIIKDKDFLDNEENEDILEDIVLTLTLFEDREMIEERLKTYAHLFDDKVMKQLKRRRYTGWGRLSRKLINGIRDKQSGKTILDFLKSDGFANRNFMQLIHDDSLTFKEDIQKAQVSGQGDSLHEHIANLAGSPAIKKGILQTVKVVDELVKVMGRHKPENIVIEMARENQTTQKGQKNSRERMKRIEEGIKELGSQILKEHPVENTQLQNEKLYLYYLQNGRDMYVDQELDINRLSDYDVDHIVPQSFLKDDSIDNKVLTRSDKNRGKSDNVPSEEVVKKMKNYWRQLLNAKLITQRKFDNLTKAERGGLSELDKAGFIKRQLVETRQITKHVAQILDSRMNTKYDENDKLIREVKVITLKSKLVSDFRKDFQFYKVREINNYHHAHDAYLNAVVGTALIKKYPKLESEFVYGDYKVYDVRKMIAKSEQEGADKRTADGSEFESPKKKRKV

SEQ ID NO: 239 - protein, 1302 aa, synthetic construct
  REGION 1..1302: note = Cas12c1 polypeptide sequence
MQTKKTHLHLISAKASRKYRRTIACLSDTAKKDLERRKQSGAADPAQELSCLKTIKFKLEVPEGSKLPSFDRISQIYNALETIEKGSLSYLLFALILSGFRIFPNSSAAKTFASSSCYKNDQFASQIKEIFGEMVKNFIPSELESILKKGRRKNNKDWTEENIKRVLNSEFGRKNSEGSSALFDSFLSKFSQELFRKFDSWNEVNKKYLEAAELLDSMLASYGPFDSVCKMIGDSDSRNSLPDKSTIAFTNNAEITVDIESSVMPYMAIAALLREYRQSKSKAAPVAYVQSHLTTTNGNGLSWFFKFGLDLIRKAPVSSKQSTSDGSKSLQELFSVPDDKLDGLKFIKEACEALPEASLLCGEKGELLGYQDFRTSFAGHIDSWVANYVNRLFELIELVNQLPESIKLPSILTQKNHNLVASLGLQEAEVSHSLELFEGLVKNVRQTLKKLAGIDISSSPNEQDIKEFYAFSDVLNRLGSIRNQIENAVQTAKKDKIDLESAIEWKEWKKLKKLPKLNGLGGGVPKQQELLDKALESVKQIRHYQRIDFERVIQWAVNEHCLETVPKFLVDAEKKKINKESSTDFAAKENAVRFLLEGIGAAARGKTDSVSKAAYNWFVVNNFLAKKDLNRYFINCQGCIYKPPYSKRRSLAFALRSDNKDTIEVVWEKFETFYKEISKEIEKFNIFSQEFQTFLHLENLRMKLLLRRIQKPIPAEIAFFSLPQEYYDSLPPNVAFLALNQEITPSEYITQFNLYSSFLNGNLILLRRSRSYLRAKFSWVGNSKLIYAAKEARLWKIPNAYWKSDEWKMILDSNVLVFDKAGNVLPAPTLKKVCEREGDLRLFYPLLRQLPHDWCYRNPFVKSVGREKNVIEVNKEGEPKVASALPGSLFRLIGPAPFKSLLDDCFFNPLDKDLRECMLIVDQEISQKVEAQKVEASLESCTYSIAVPIRYHLEEPKVSNQFENVLAIDQGEAGLAYAVFSLKSIGEAETKPIAVGTIRIPSIRRLIHSVSTYRKKKQRLQNFKQNYDSTAFIMRENVTGDVCAKIVGLMKEFNAFPVLEYDVKNLESGSRQLSAVYKAVNSHFLYFKEPGRDALRKQLWYGGDSWTIDGIEIVTRERKEDGKEGVEKIVPLKVFPGRSVSARFTSKTCSCCGRNVFDWLFTEKKAKTNKKFNVNSKGELTTADGVIQLFEADRSKGPKFYARRKERTPLTKPIAKGSYSLEEIERRVRTNLRRAPKSKQSRDTSQSQYFCVYKDCALHFSGMQADENAAINIGRRFLTALRKNRRSDFPSNVKISDRLLDN

SEQ ID NO: 240 - protein, 1218 aa, synthetic construct
  REGION 1..1218: note = Cas12c2 polypeptide sequence
MTKHSIPLHAFRNSGADARKWKGRIALLAKRGKETMRTLQFPLEMSEPEAAAINTTPFAVAYNAIEGTGKGTLFDYWAKLHLAGFRFFPSGGAATIFRQQAVFEDASWNAAFCQQSGKDWPWLVPSKLYERFTKAPREVAKKDGSKKSIEFTQENVANESHVSLVGASITDKTPEDQKEFFLKMAGALAEKFDSWKSANEDRIVAMKVIDEFLKSEGLHLPSLENIAVKCSVETKPDNATVAWHDAPMSGVQNLAIGVFATCASRIDNIYDLNGGKLSKLIQESATTPNVTALSWLFGKGLEYFRTTDIDTIMQDFNIPASAKESIKPLVESAQAIPTMTVLGKKNYAPFRPNFGGKIDSWIANYASRLMLLNDILEQIEPGFELPQALLDNETLMSGIDMTGDELKELIEAVYAWVDAAKQGLATLLGRGGNVDDAVQTFEQFSAMMDTLNGTLNTISARYVRAVEMAGKDEARLEKLIECKFDIPKWCKSVPKLVGISGGLPKVEEEIKVMNAAFKDVRARMFVRFEEIAAYVASKGAGMDVYDALEKRELEQIKKLKSAVPERAHIQAYRAVLHRIGRAVQNCSEKTKQLFSSKVIEMGVFKNPSHLNNFIFNQKGAIYRSPFDRSRHAPYQLHADKLLKNDWLELLAEISATLMASESTEQMEDALRLERTRLQLQLSGLPDWEYPASLAKPDIEVEIQTALKMQLAKDTVTSDVLQRAFNLYSSVLSGLTFKLLRRSFSLKMRFSVADTTQLIYVPKVCDWAIPKQYLQAEGEIGIAARVVTESSPAKMVTEVEMKEPKALGHFMQQAPHDWYFDASLGGTQVAGRIVEKGKEVGKERKLVGYRMRGNSAYKTVLDKSLVGNTELSQCSMIIEIPYTQTVDADFRAQVQAGLPKVSINLPVKETITASNKDEQMLFDRFVAIDLGERGLGYAVFDAKTLELQESGHRPIKAITNLLNRTHHYEQRPNQRQKFQAKFNVNLSELRENTVGDVCHQINRICAYYNAFPVLEYMVPDRLDKQLKSVYESVTNRYIWSSTDAHKSARVQFWLGGETWEHPYLKSAKDKKPLVLSPGRGASGKGTSQTCSCCGRNPFDLIKDMKPRAKIAVVDGKAKLENSELKLFERNLESKDDMLARRHRNERAGMEQPLTPGNYTVDEIKALLRANLRRAPKNRRTKDTTVSEYHCVFSDCGKTMHADENAAVNIGGKFIADIEK

SEQ ID NO: 241 - protein, 1252 aa, Oleiphilus sp.
  REGION 1..1252: note = MISC_FEATURE - OspCas12c polypeptide sequence
MTKLRHRQKKLTHDWAGSKKREVLGSNGKLQNPLLMPVKKGQVTEFRKAFSAYARATKGEMTDGRKNMFTHSFEPFKTKPSLHQCELADKAYQSLHSYLPGSLAHFLLSAHALGFRIFSKSGEATAFQASSKIEAYESKLASELACVDLSIQNLTISTLFNALTTSVRGKGEETSADPLIARFYTLLTGKPLSRDTQGPERDLAEVISRKIASSFGTWKEMTANPLQSLQFFEEELHALDANVSLSPAFDVLIKMNDLQGDLKNRTIVFDPDAPVFEYNAEDPADIIIKLTARYAKEAVIKNQNVGNYVKNAITTTNANGLGWLLNKGLSLLPVSTDDELLEFIGVERSHPSCHALIELIAQLEAPELFEKNVFSDTRSEVQGMIDSAVSNHIARLSSSRNSLSMDSEELERLIKSFQIHTPHCSLFIGAQSLSQQLESLPEALQSGVNSADILLGSTQYMLTNSLVEESIATYQRTLNRINYLSGVAGQINGAIKRKAIDGEKIHLPAAWSELISLPFIGQPVIDVESDLAHLKNQYQTLSNEFDTLISALQKNFDLNFNKALLNRTQHFEAMCRSTKKNALSKPEIVSYRDLLARLTSCLYRGSLVLRRAGIEVLKKHKIFESNSELREHVHERKHFVFVSPLDRKAKKLLRLTDSRPDLLHVIDEILQHDNLENKDRESLWLVRSGYLLAGLPDQLSSSFINLPIITQKGDRRLIDLIQYDQINRDAFVMLVTSAFKSNLSGLQYRANKQSFVVTRTLSPYLGSKLVYVPKDKDWLVPSQMFEGRFADILQSDYMVWKDAGRLCVIDTAKHLSNIKKSVFSSEEVLAFLRELPHRTFIQTEVRGLGVNVDGIAFNNGDIPSLKTFSNCVQVKVSRTNTSLVQTLNRWFEGGKVSPPSIQFERAYYKKDDQIHEDAAKRKIRFQMPATELVHASDDAGWTPSYLLGIDPGEYGMGLSLVSINNGEVLDSGFIHINSLINFASKKSNHQTKVVPRQQYKSPYANYLEQSKDSAAGDIAHILDRLIYKLNALPVFEALSGNSQSAADQVWTKVLSFYTWGDNDAQNSIRKQHWFGASHWDIKGMLRQPPTEKKPKPYIAFPGSQVSSYGNSQRCSCCGRNPIEQLREMAKDTSIKELKIRNSEIQLFDGTIKLFNPDPSTVIERRRHNLGPSRIPVADRTFKNISPSSLEFKELITIVSRSIRHSPEFIAKKRGIGSEYFCAYSDCNSSLNSEANAAANVAQKFQKQLFFEL

SEQ ID NO: 242 - protein, 767 aa, synthetic construct
  REGION 1..767: note = Cas12g1 polypeptide sequence
MAQASSTPAVSPRPRPRYREERTLVRKLLPRPGQSKQEFRENVKKLRKAFLQFNADVSGVCQWAIQFRPRYGKPAEPTETFWKFFLEPETSLPPNDSRSPEFRRLQAFEAAAGINGAAALDDPAFTNELRDSILAVASRPKTKEAQRLFSRLKDYQPAHRMILAKVAAEWIESRYRRAHQNWERNYEEWKKEKQEWEQNHPELTPEIREAFNQIFQQLEVKEKRVRICPAARLLQNKDNCQYAGKNKHSVLCNQFNEFKKNHLQGKAIKFFYKDAEKYLRCGLQSLKPNVQGPFREDWNKYLRYMNLKEETLRGKNGGRLPHCKNLGQECEFNPHTALCKQYQQQLSSRPDLVQHDELYRKWRREYWREPRKPVFRYPSVKRHSIAKIFGENYFQADFKNSVVGLRLDSMPAGQYLEFAFAPWPRNYRPQPGETEISSVHLHFVGTRPRIGFRFRVPHKRSRFDCTQEELDELRSRTFPRKAQDQKFLEAARKRLLETFPGNAEQELRLLAVDLGTDSARAAFFIGKTFQQAFPLKIVKIEKLYEQWPNQKQAGDRRDASSKQPRPGLSRDHVGRHLQKMRAQASEIAQKRQELTGTPAPETTTDQAAKKATLQPFDLRGLTVHTARMIRDWARLNARQIIQLAEENQVDLIVLESLRGFRPPGYENLDQEKKRRVAFFAHGRIRRKVTEKAVERGMRVVTVPYLASSKVCAECRKKQKDNKQWEKNKKRGLFKCEGCGSQAQVDENAARVLGRVFWGEIELPTAIP

SEQ ID NO: 243 - protein, 870 aa, synthetic construct
  REGION 1..870: note = Cas12h1 polypeptide sequence
MKVHEIPRSQLLKIKQYEGSFVEWYRDLQEDRKKFASLLFRWAAFGYAAREDDGATYISPSQALLERRLLLGDAEDVAIKFLDVLFKGGAPSSSCYSLFYEDFALRDKAKYSGAKREFIEGLATMPLDKIIERIRQDEQLSKIPAEEWLILGAEYSPEEIWEQVAPRIVNVDRSLGKQLRERLGIKCRRPHDAGYCKILMEVVARQLRSHNETYHEYLNQTHEMKTKVANNLTNEFDLVCEFAEVLEEKNYGLGWYVLWQGVKQALKEQKKPTKIQIAVDQLRQPKFAGLLTAKWRALKGAYDTWKLKKRLEKRKAFPYMPNWDNDYQIPVGLTGLGVFTLEVKRTEVVVDLKEHGKLFCSHSHYFGDLTAEKHPSRYHLKFRHKLKLRKRDSRVEPTIGPWIEAALREITIQKKPNGVFYLGLPYALSHGIDNFQIAKRFFSAAKPDKEVINGLPSEMVVGAADLNLSNIVAPVKARIGKGLEGPLHALDYGYGELIDGPKILTPDGPRCGELISLKRDIVEIKSAIKEFKACQREGLTMSEETTTWLSEVESPSDSPRCMIQSRIADTSRRLNSFKYQMNKEGYQDLAEALRLLDAMDSYNSLLESYQRMHLSPGEQSPKEAKFDTKRASFRDLLRRRVAHTIVEYFDDCDIVFFEDLDGPSDSDSRNNALVKLLSPRTLLLYIRQALEKRGIGMVEVAKDGTSQNNPISGHVGWRNKQNKSEIYFYEDKELLVMDADEVGAMNILCRGLNHSVCPYSFVTKAPEKKNDEKKEGDYGKRVKRFLKDRYGSSNVRFLVASMGFVTVTTKRPKDALVGKRLYYHGGELVTHDLHNRMKDEIKYLVEKEVLARRVSLSDSTIKSYKSFAHV

SEQ ID NO: 244 - protein, 1093 aa, synthetic construct
  REGION 1..1093: note = Cas12i1 polypeptide sequence
MSNKEKNASETRKAYTTKMIPRSHDRMKLLGNFMDYLMDGTPIFFELWNQFGGGIDRDIISGTANKDKISDDLLLAVNWFKVMPINSKPQGVSPSNLANLFQQYSGSEPDIQAQEYFASNFDTEKHQWKDMRVEYERLLAELQLSRSDMHHDLKLMYKEKCIGLSLSTAHYITSVMFGTGAKNNRQTKHQFYSKVIQLLEESTQINSVEQLASIILKAGDCDSYRKLRIRCSRKGATPSILKIVQDYELGTNHDDEVNVPSLIANLKEKLGRFEYECEWKCMEKIKAFLASKVGPYYLGSYSAMLENALSPIKGMTTKNCKFVLKQIDAKNDIKYENEPFGKIVEGFFDSPYFESDTNVKWVLHPHHIGESNIKTLWEDLNAIHSKYEEDIASLSEDKKEKRIKVYQGDVCQTINTYCEEVGKEAKTPLVQLLRYLYSRKDDIAVDKIIDGITFLSKKHKVEKQKINPVIQKYPSFNFGNNSKLLGKIISPKDKLKHNLKCNRNQVDNYIWIEIKVLNTKTMRWEKHHYALSSTRFLEEVYYPATSENPPDALAARFRTKTNGYEGKPALSAEQIEQIRSAPVGLRKVKKRQMRLEAARQQNLLPRYTWGKDFNINICKRGNNFEVTLATKVKKKKEKNYKVVLGYDANIVRKNTYAAIEAHANGDGVIDYNDLPVKPIESGFVTVESQVRDKSYDQLSYNGVKLLYCKPHVESRRSFLEKYRNGTMKDNRGNNIQIDFMKDFEAIADDETSLYYFNMKYCKLLQSSIRNHSSQAKEYREEIFELLRDGKLSVLKLSSLSNLSFVMFKVAKSLIGTYFGHLLKKPKNSKSDVKAPPITDEDKQKADPEMFALRLALEEKRLNKVKSKKEVIANKIVAKALELRDKYGPVLIKGENISDTTKKGKKSSTNSFLMDWLARGVANKVKEMVMMHQGLEFVEVNPNFTSHQDPFVHKNPENTFRARYSRCTPSELTEKNRKEILSFLSDKPSKRPTNAYYNEGAMAFLATYGLKKNDVLGVSLEKFKQIMANILHQRSEDQLLFPSRGGMFYLATYKLDADATSVNWNGKQFWVCNADLVAAYNVGLVDIQKDFKKK

SEQ ID NO: 245 - protein, 1054 aa, synthetic construct
  REGION 1..1054: note = Cas12i2 polypeptide sequence
MSSAIKSYKSVLRPNERKNQLLKSTIQCLEDGSAFFFKMLQGLFGGITPEIVRFSTEQEKQQQDIALWCAVNWFRPVSQDSLTHTIASDNLVEKFEEYYGGTASDAIKQYFSASIGESYYWNDCRQQYYDLCRELGVEVSDLTHDLEILCREKCLAVATESNQNNSIISVLFGTGEKEDRSVKLRITKKILEAISNLKEIPKNVAPIQEIILNVAKATKETFRQVYAGNLGAPSTLEKFIAKDGQKEFDLKKLQTDLKKVIRGKSKERDWCCQEELRSYVEQNTIQYDLWAWGEMFNKAHTALKIKSTRNYNFAKQRLEQFKEIQSLNNLLVVKKLNDFFDSEFFSGEETYTICVHHLGGKDLSKLYKAWEDDPADPENAIVVLCDDLKNNFKKEPIRNILRYIFTIRQECSAQDILAAAKYNQQLDRYKSQKANPSVLGNQGFTWTNAVILPEKAQRNDRPNSLDLRIWLYLKLRHPDGRWKKHHIPFYDTRFFQEIYAAGNSPVDTCQFRTPRFGYHLPKLTDQTAIRVNKKHVKAAKTEARIRLAIQQGTLPVSNLKITEISATINSKGQVRIPVKFDVGRQKGTLQIGDRFCGYDQNQTASHAYSLWEVVKEGQYHKELGCFVRFISSGDIVSITENRGNQFDQLSYEGLAYPQYADWRKKASKFVSLWQITKKNKKKEIVTVEAKEKFDAICKYQPRLYKFNKEYAYLLRDIVRGKSLVELQQIRQEIFRFIEQDCGVTRLGSLSLSTLETVKAVKGIIYSYFSTALNASKNNPISDEQRKEFDPELFALLEKLELIRTRKKKQKVERIANSLIQTCLENNIKFIRGEGDLSTTNNATKKKANSRSMDWLARGVFNKIRQLAPMHNITLFGCGSLYTSHQDPLVHRNPDKAMKCRWAAIPVKDIGDWVLRKLSQNLRAKNIGTGEYYHQGVKEFLSHYELQDLEEELLKWRSDRKSNIPCWVLQNRLAEKLGNKEAVVYIPVRGGRIYFATHKVATGAVSIVFDQKQVWVCNADHVAAANIALTVKGIGEQSSDEENPDGSRIKLQLTS

SEQ ID NO: 246 - protein, 4 aa, synthetic construct
  REGION 1..4: note = synthetic peptide sequence
GGGS

SEQ ID NO: 247 - protein, 5 aa, synthetic construct
  REGION 1..5: note = synthetic peptide sequence
GGGGS

SEQ ID NO: 248 - protein, 5 aa, synthetic construct
  REGION 1..5: note = synthetic peptide sequence
EAAAK

SEQ ID NO: 249 - protein, 16 aa, synthetic construct
  REGION 1..16: note = synthetic peptide sequence
SGSETPGTSESATPES

SEQ ID NO: 250 - protein, 6 aa, synthetic construct
  REGION 1..6: note = linker peptide sequence
GGSGGS

SEQ ID NO: 251 - protein, 20 aa, synthetic construct
  REGION 1..20: note = synthetic peptide sequence
GSSGSETPGTSESATPESSG

SEQ ID NO: 252 - DNA, 18 bp, synthetic construct
  misc_feature 1..18: note = synthetic oligonucleotide sequence
  source 1..18: mol_type = other DNA
ggaggctctggaggaagc

SEQ ID NO: 253 - DNA, 60 bp, synthetic construct
  misc_feature 1..60: note = synthetic oligonucleotide sequence
  source 1..60: mol_type = other DNA
ggctcttctggatctgaaacacctggcacaagcgagagcgccacccctgagagctctggc

SEQ ID NO: 254 - protein, 1129 aa, Alicyclobacillus acidiphilus
  REGION 1..1129: note = MISC_FEATURE - AacCas12b polypeptide sequence
MAVKSMKVKLRLDNMPEIRAGLWKLHTEVNAGVRYYTEWLSLLRQENLYRRSPNGDGEQECYKTAEECKAELLERLRARQVENGHCGPAGSDDELLQLARQLYELLVPQAIGAKGDAQQIARKFLSPLADKDAVGGLGIAKAGNKPRWVRMREAGEPGWEEEKAKAEARKSTDRTADVLRALADFGLKPLMRVYTDSDMSSVQWKPLRKGQAVRTWDRDMFQQAIERMMSWESWNQRVGEAYAKLVEQKSRFEQKNFVGQEHLVQLVNQLQQDMKEASHGLESKEQTAHYLTGRALRGSDKVFEKWEKLDPDAPFDLYDTEIKNVQRRNTRRFGSHDLFAKLAEPKYQALWREDASFLTRYAVYNSIVRKLNHAKMFATFTLPDATAHPIWTRFDKLGGNLHQYTFLFNEFGEGRHAIRFQKLLTVEDGVAKEVDDVTVPISMSAQLDDLLPRDPHELVALYFQDYGAEQHLAGEFGGAKIQYRRDQLNHLHARRGARDVYLNLSVRVQSQSEARGERRPPYAAVFRLVGDNHRAFVHFDKLSDYLAEHPDDGKLGSEGLLSGLRVMSVDLGLRTSASISVFRVARKDELKPNSEGRVPFCFPIEGNENLVAVHERSQLLKLPGETESKDLRAIREERQRTLRQLRTQLAYLRLLVRCGSEDVGRRERSWAKLIEQPMDANQMTPDWREAFEDELQKLKSLYGICGDREWTEAVYESVRRVWRHMGKQVRDWRKDVRSGERPKIRGYQKDVVGGNSIEQIEYLERQYKFLKSWSFFGKVSGQVIRAEKGSRFAITLREHIDHAKEDRLKKLADRIIMEALGYVYALDDERGKGKWVAKYPPCQLILLEELSEYQFNNDRPPSENNQLMQWSHRGVFQELLNQAQVHDLLVGTMYAAFSSRFDARTGAPGIRCRRVPARCAREQNPEPFPWWLNKFVAEHKLDGCPLRADDLIPTGEGEFFVSPFSAEEGDFHQIHADLNAAQNLQRRLWSDFDISQIRLRCDWGEVDGEPVLIPRTTGKRTADSYGNKVFYTKTGVTYYERERGKKRRKVFAQEELSEEEAELLVEADEAREKSVVLMRDPSGIINRGDWTRQKEFWSMVNQRIEGYLVKQIRSRVRLQESACENTGDI

SEQ ID NO: 255 - protein, 1140 aa, Bacillus hisashii
  REGION 1..1140: note = MISC_FEATURE - BhCas12b polypeptide sequence
MAPKKKRKVGIHGVPAAATRSFILKIEPNEEVKKGLWKTHEVLNHGIAYYMNILKLIRQEAIYEHHEQDPKNPKKVSKAEIQAELWDFVLKMQKCNSFTHEVDKDEVFNILRELYEELVPSSVEKKGEANQLSNKFLYPLVDPNSQSGKGTASSGRKPRWYNLKIAGDPSWEEEKKKWEEDKKKDPLAKILGKLAEYGLIPLFIPYTDSNEPIVKEIKWMEKSRNQSVRRLDKDMFIQALERFLSWESWNLKVKEEYEKVEKEYKTLEERIKEDIQALKALEQYEKERQEQLLRDTLNTNEYRLSKRGLRGWREIIQKWLKMDENEPSEKYLEVFKDYQRKHPREAGDYSVYEFLSKKENHFIWRNHPEYPYLYATFCEIDKKKKDAKQQATFTLADPINHPLWVRFEERSGSNLNKYRILTEQLHTEKLKKKLTVQLDRLIYPTESGGWEEKGKVDIVLLPSRQFYNQIFLDIEEKGKHAFTYKDESIKFPLKGTLGGARVQFDRDHLRRYPHKVESGNVGRIYFNMTVNIEPTESPVSKSLKIHRDDFPKVVNFKPKELTEWIKDSKGKKLKSGIESLEIGLRVMSIDLGQRQAAAASIFEVVDQKPDIEGKLFFPIKGTELYAVHRASFNIKLPGETLVKSREVLRKAREDNLKLMNQKLNFLRNVLHFQQFEDITEREKRVTKWISRQENSDVPLVYQDELIQIRELMYKPYKDWVAFLKQLHKRLEVEIGKEVKHWRKSLSDGRKGLYGISLKNIDEIDRTRKFLLRWSLRPTEPGEVRRLEPGQRFAIDQLNHLNALKEDRLKKMANTIIMHALGYCYDVRKKKWQAKNPACQIILFEDLSNYNPYEERSRFENSKLMKWSRREIPRQVALQGEIYGLQVGEVGAQFSSRFHAKTGSPGIRCSVVTKEKLQDNRFFKNLQREGRLTLDKIAVLKEGDLYPDKGGEKFISLSKDRKCVTTHADINAAQNLQKRFWTRTHGFYKVYCKAYQVDGQTVYIPESKDQKQKIIEEFGEGYFILKDGVYEWVNAGKLKIKKGSSKQSSSELVDSDILKDSFDLASELKGEKLMLYRDPSGNVFPSDKWMAAGVFFGKLERILISKLTNQYSISTIEDDSSKQSMKRPAATKKAGQAKKKK

SEQ ID NO: 256 - protein, 1108 aa, Bacillus thermoamylovorans
  REGION 1..1108: note = MISC_FEATURE - BTCas12b polypeptide sequence
MATRSFILKIEPNEEVKKGLWKTHEVLNHGIAYYMNILKLIRQEAIYEHHEQDPKNPKKVSKAEIQAELWDFVLKMQKCNSFTHEVDKDVVFNILRELYEELVPSSVEKKGEANQLSNKFLYPLVDPNSQSGKGTASSGRKPRWYNLKIAGDPSWEEEKKKWEEDKKKDPLAKILGKLAEYGLIPLFIPFTDSNEPIVKEIKWMEKSRNQSVRRLDKDMFIQALERFLSWESWNLKVKEEYEKVEKEHKTLEERIKEDIQAFKSLEQYEKERQEQLLRDTLNTNEYRLSKRGLRGWREIIQKWLKMDENEPSEKYLEVFKDYQRKHPREAGDYSVYEFLSKKENHFIWRNHPEYPYLYATFCEIDKKKKDAKQQATFTLADPINHPLWVRFEERSGSNLNKYRILTEQLHTEKLKKKLTVQLDRLIYPTESGGWEEKGKVDIVLLPSRQFYNQIFLDIEEKGKHAFTYKDESIKFPLKGTLGGARVQFDRDHLRRYPHKVESGNVGRIYFNMTVNIEPTESPVSKSLKIHRDDFPKFVNFKPKELTEWIKDSKGKKLKSGIESLEIGLRVMSIDLGQRQAAAASIFEVVDQKPDIEGKLFFPIKGTELYAVHRASFNIKLPGETLVKSREVLRKAREDNLKLMNQKLNFLRNVLHFQQFEDITEREKRVTKWISRQENSDVPLVYQDELIQIRELMYKPYKDWVAFLKQLHKRLEVEIGKEVKHWRKSLSDGRKGLYGISLKNIDEIDRTRKFLLRWSLRPTEPGEVRRLEPGQRFAIDQLNHLNALKEDRLKKMANTIIMHALGYCYDVRKKKWQAKNPACQIILFEDLSNYNPYEERSRFENSKLMKWSRREIPRQVALQGEIYGLQVGEVGAQFSSRFHAKTGSPGIRCSVVTKEKLQDNRFFKNLQREGRLTLDKIAVLKEGDLYPDKGGEKFISLSKDRKLVTTHADINAAQNLQKRFWTRTHGFYKVYCKAYQVDGQTVYIPESKDQKQKIIEEFGEGYFILKDGVYEWGNAGKLKIKKGSSKQSSSELVDSDILKDSFDLASELKGEKLMLYRDPSGNVFPSDKWMAAGVFFGKLERILISKLTNQYSISTIEDDSSKQSM

SEQ ID NO: 257 - protein, 1112 aa, Bacillus sp.
  REGION 1..1112: note = MISC_FEATURE - BvCas12b (Bacillus sp. V3-13) polypeptide sequence
MAIRSIKLKMKTNSGTDSIYLRKALWRTHQLINEGIAYYMNLLTLYRQEAIGDKTKEAYQAELINIIRNQQRNNGSSEEHGSDQEILALLRQLYELIIPSSIGESGDANQLGNKFLYPLVDPNSQSGKGTSNAGRKPRWKRLKEEGNPDWELEKKKDEERKAKDPTVKIFDNLNKYGLLPLFPLFTNIQKDIEWLPLGKRQSVRKWDKDMFIQAIERLLSWESWNRRVADEYKQLKEKTESYYKEHLTGGEEWIEKIRKFEKERNMELEKNAFAPNDGYFITSRQIRGWDRVYEKWSKLPESASPEELWKVVAEQQNKMSEGFGDPKVFSFLANRENRDIWRGHSERIYHIAAYNGLQKKLSRTKEQATFTLPDAIEHPLWIRYESPGGTNLNLFKLEEKQKKNYYVTLSKIIWPSEEKWIEKENIEIPLAPSIQFNRQIKLKQHVKGKQEISFSDYSSRISLDGVLGGSRIQFNRKYIKNHKELLGEGDIGPVFFNLVVDVAPLQETRNGRLQSPIGKALKVISSDFSKVIDYKPKELMDWMNTGSASNSFGVASLLEGMRVMSIDMGQRTSASVSIFEVVKELPKDQEQKLFYSINDTELFAIHKRSFLLNLPGEVVTKNNKQQRQERRKKRQFVRSQIRMLANVLRLETKKTPDERKKAIHKLMEIVQSYDSWTASQKEVWEKELNLLTNMAAFNDEIWKESLVELHHRIEPYVGQIVSKWRKGLSEGRKNLAGISMWNIDELEDTRRLLISWSKRSRTPGEANRIETDEPFGSSLLQHIQNVKDDRLKQMANLIIMTALGFKYDKEEKDRYKRWKETYPACQIILFENLNRYLFNLDRSRRENSRLMKWAHRSIPRTVSMQGEMFGLQVGDVRSEYSSRFHAKTGAPGIRCHALTEEDLKAGSNTLKRLIEDGFINESELAYLKKGDIIPSQGGELFVTLSKRYKKDSDNNELTVIHADINAAQNLQKRFWQQNSEVYRVPCQLARMGEDKLYIPKSQTETIKKYFGKGSFVKNNTEQEVYKWEKSEKMKIKTDTTFDLQDLDGFEDISKTIELAQEQQKKYLTMFRDPSGYFFNNETWRPQKEYWSIVNNIIKSCLKKKILSNKVEL

SEQ ID NO: 258 - DNA, 47 bp, synthetic construct
  misc_feature 1..47: note = 5'UTR oligonucleotide sequence
  source 1..47: mol_type = other DNA
gggaaataagagagaaaagaagagtaagaagaaatataagagccacc

SEQ ID NO: 259 - DNA, 101 bp, synthetic construct
  misc_feature 1..101: note = 3'UTR (TriLink standard UTR)polynucleotide sequence
  source 1..101: mol_type = other DNA
gctggagcctcggtggccatgcttcttgccccttgggcctccccccagcccctcctccccttcctgcacccgtacccccgtggtctttgaataaagtctga

SEQ ID NO: 260 - DNA, 3420 bp, Bacillus hisashii
  misc_feature 1..3420: note = bhCas12b (V4) polynucleotide sequence
  source 1..3420: mol_type = genomic DNA
atggccccaaagaagaagcggaaggtcggtatccacggagtcccagcagccgccaccagatccttcatcctgaagatcgagcccaacgaggaagtgaagaaaggcctctggaaaacccacgaggtgctgaaccacggaatcgcctactacatgaatatcctgaagctgatccggcaagaggccatctacgagcaccacgagcaggaccccaagaatcccaagaaggtgtccaaggccgagatccaggccgagctgtgggatttcgtgctgaagatgcagaagtgcaacagcttcacacacgaggtggacaaggacgaggtgttcaacatcctgagagagctgtacgaggaactggtgcccagcagcgtggaaaagaagggcgaagccaaccagctgagcaacaagtttctgtaccctctggtggaccccaacagccagtctggaaagggaacagccagcagcggcagaaagcccagatggtacaacctgaagattgccggcgatccctcctgggaagaagagaagaagaagtgggaagaagataagaaaaaggacccgctggccaagatcctgggcaagctggctgagtacggactgatccctctgttcatcccctacaccgacagcaacgagcccatcgtgaaagaaatcaagtggatggaaaagtcccggaaccagagcgtgcggcggctggataaggacatgttcattcaggccctggaacggttcctgagctgggagagctggaacctgaaagtgaaagaggaatacgagaaggtcgagaaagagtacaagaccctggaagagaggatcaaagaggacatccaggctctgaaggctctggaacagtatgagaaagagcggcaagaacagctgctgcgggacaccctgaacaccaacgagtaccggctgagcaagagaggccttagaggctggcgggaaatcatccagaaatggctgaaaatggacgagaacgagccctccgagaagtacctggaagtgttcaaggactaccagcggaagcaccctagagaggccggcgattacagcgtgtacgagttcctgtccaagaaagagaaccacttcatctggcggaatcaccctgagtacccctacctgtacgccaccttctgcgagatcgacaagaaaaagaaggacgccaagcagcaggccaccttcacactggccgatcctatcaatcaccctctgtgggtccgattcgaggaaagaagcggcagcaacctgaacaagtacagaatcctgaccgagcagctgcacaccgagaagctgaagaaaaagctgacagtgcagctggaccggctgatctaccctacagaatctggcggctgggaagagaagggcaaagtggacattgtgctgctgcccagccggcagttctacaaccagatcttcctggacatcgaggaaaagggcaagcacgccttcacctacaaggatgagagcatcaagttccctctgaagggcacactcggcggagccagagtgcagttcgacagagatcacctgagaagataccctcacaaggtggaaagcggcaacgtgggcagaatctacttcaacatgaccgtgaacatcgagcctacagagtccccagtgtccaagtctctgaagatccaccgggacgacttccccaaggtggtcaacttcaagcccaaagaactgaccgagtggatcaaggacagcaagggcaagaaactgaagtccggcatcgagtccctggaaatcggcctgagagtgatgagcatcgacctgggacagagacaggccgctgccgcctctattttcgaggtggtggatcagaagcccgacatcgaaggcaagctgtttttcccaatcaagggcaccgagctgtatgccgtgcacagagccagcttcaacatcaagctgcccggcgagacactggtcaagagcagagaagtgctgcggaaggccagagaggacaatctgaaactgatgaaccagaagctcaacttcctgcggaacgtgctgcacttccagcagttcgaggacatcaccgagagagagaagcgggtcaccaagtggatcagcagacaagagaacagcgacgtgcccctggtgtaccaggatgagctgatccagatccgcgagctgatgtacaagccttacaaggactgggtcgccttcctgaagcagctccacaagagactggaagtcgagatcggcaaagaagtgaagcactggcggaagtccctgagcgacggaagaaagggcctgtacggcatctccctgaagaacatcgacgagatcgatcggacccggaagttcctgctgagatggtccctgaggcctaccgaacctggcgaagtgcgtagactggaacccggccagagattcgccatcgaccagctgaatcacctgaacgccctgaaagaagatcggctgaagaagatggccaacaccatcatcatgcacgccctgggctactgctacgacgtgcggaagaagaaatggcaggctaagaaccccgcctgccagatcatcctgttcgaggatctgagcaactacaacccctacgaggaaaggtcccgcttcgagaacagcaagctcatgaagtggtccagacgcgagatccccagacaggttgcactgcagggcgagatctatggcctgcaagtgggagaagtgggcgctcagttcagcagcagattccacgccaagacaggcagccctggcatcagatgtagcgtcgtgaccaaagagaagctgcaggacaatcggttcttcaagaatctgcagagagagggcagactgaccctggacaaaatcgccgtgctgaaagagggcgatctgtacccagacaaaggcggcgagaagttcatcagcctgagcaaggatcggaagtgcgtgaccacacacgccgacatcaacgccgctcagaacctgcagaagcggttctggacaagaacccacggcttctacaaggtgtactgcaaggcctaccaggtggacggccagaccgtgtacatccctgagagcaaggaccagaagcagaagatcatcgaagagttcggcgagggctacttcattctgaaggacggggtgtacgaatgggtcaacgccggcaagctgaaaatcaagaagggcagctccaagcagagcagcagcgagctggtggatagcgacatcctgaaagacagcttcgacctggcctccgagctgaaaggcgaaaagctgatgctgtacagggaccccagcggcaatgtgttccccagcgacaaatggatggccgctggcgtgttcttcggaaagctggaacgcatcctgatcagcaagctgaccaaccagtactccatcagcaccatcgaggacgacagcagcaagcagtctatgaaaaggccggcggccacgaaaaaggccggccaggcaaaaaagaaaaag

SEQ ID NO: 261 - protein, 17 aa, synthetic construct
  REGION 1..17: note = synthetic peptide sequence
MAPKKKRKVGIHGVPAA

SEQ ID NO: 262 - DNA, 51 bp, synthetic construct
  misc_feature 1..51: note = synthetic oligonucleotide sequence
  source 1..51: mol_type = other DNA
atggccccaaagaagaagcggaaggtcggtatccacggagtcccagcagcc

SEQ ID NO: 263 - protein, 1554 aa, synthetic construct
  REGION 1..1554: note = 101 Cas9 TadAins 1015 polypeptide sequence
MDKKYSIGLAIGTNSVGWAVITDEYKVPSKKFKVLGNTDRHSIKKNLIGALLFDSGETAEATRLKRTARRRYTRRKNRICYLQEIFSNEMAKVDDSFFHRLEESFLVEEDKKHERHPIFGNIVDEVAYHEKYPTIYHLRKKLVDSTDKADLRLIYLALAHMIKFRGHFLIEGDLNPDNSDVDKLFIQLVQTYNQLFEENPINASGVDAKAILSARLSKSRRLENLIAQLPGEKKNGLFGNLIALSLGLTPNFKSNFDLAEDAKLQLSKDTYDDDLDNLLAQIGDQYADLFLAAKNLSDAILLSDILRVNTEITKAPLSASMIKRYDEHHQDLTLLKALVRQQLPEKYKEIFFDQSKNGYAGYIDGGASQEEFYKFIKPILEKMDGTEELLVKLNREDLLRKQRTFDNGSIPHQIHLGELHAILRRQEDFYPFLKDNREKIEKILTFRIPYYVGPLARGNSRFAWMTRKSEETITPWNFEEVVDKGASAQSFIERMTNFDKNLPNEKVLPKHSLLYEYFTVYNELTKVKYVTEGMRKPAFLSGEQKKAIVDLLFKTNRKVTVKQLKEDYFKKIECFDSVEISGVEDRFNASLGTYHDLLKIIKDKDFLDNEENEDILEDIVLTLTLFEDREMIEERLKTYAHLFDDKVMKQLKRRRYTGWGRLSRKLINGIRDKQSGKTILDFLKSDGFANRNFMQLIHDDSLTFKEDIQKAQVSGQGDSLHEHIANLAGSPAIKKGILQTVKVVDELVKVMGRHKPENIVIEMARENQTTQKGQKNSRERMKRIEEGIKELGSQILKEHPVENTQLQNEKLYLYYLQNGRDMYVDQELDINRLSDYDVDHIVPQSFLKDDSIDNKVLTRSDKNRGKSDNVPSEEVVKKMKNYWRQLLNAKLITQRKFDNLTKAERGGLSELDKAGFIKRQLVETRQITKHVAQILDSRMNTKYDENDKLIREVKVITLKSKLVSDFRKDFQFYKVREINNYHHAHDAYLNAVVGTALIKKYPKLESEFVYGDYKVGSSGSETPGTSESATPESSGSEVEFSHEYWMRHALTLAKRARDEREVPVGAVLVLNNRVIGEGWNRAIGLHDPTAHAEIMALRQGGLVMQNYRLIDATLYVTFEPCVMCAGAMIHSRIGRVVFGVRNAKTGAAGSLMDVLHYPGMNHRVEITEGILADECAALLCYFFRMPRQVFNAQKKAQSSTDYDVRKMIAKSEQEIGKATAKYFFYSNIMNFFKTEITLANGEIRKRPLIETNGETGEIVWDKGRDFATVRKVLSMPQVNIVKKTEVQTGGFSKESILPKRNSDKLIARKKDWDPKKYGGFDSPTVAYSVLVVAKVEKGKSKKLKSVKELLGITIMERSSFEKNPIDFLEAKGYKEVKKDLIIKLPKYSLFELENGRKRMLASAGELQKGNELALPSKYVNFLYLASHYEKLKGSPEDNEQKQLFVEQHKHYLDEIIEQISEFSKRVILADANLDKVLSAYNKHRDKPIREQAENIIHLFTLTNLGAPAAFKYFDTTIDRKRYTSTKEVLDATLIHQSITGLYETRIDLSQLGGD

SEQ ID NO: 264 - protein, 1554 aa, synthetic construct
  REGION 1..1554: note = 102 Cas9 TadAins 1022 polypeptide sequence
MDKKYSIGLAIGTNSVGWAVITDEYKVPSKKFKVLGNTDRHSIKKNLIGALLFDSGETAEATRLKRTARRRYTRRKNRICYLQEIFSNEMAKVDDSFFHRLEESFLVEEDKKHERHPIFGNIVDEVAYHEKYPTIYHLRKKLVDSTDKADLRLIYLALAHMIKFRGHFLIEGDLNPDNSDVDKLFIQLVQTYNQLFEENPINASGVDAKAILSARLSKSRRLENLIAQLPGEKKNGLFGNLIALSLGLTPNFKSNFDLAEDAKLQLSKDTYDDDLDNLLAQIGDQYADLFLAAKNLSDAILLSDILRVNTEITKAPLSASMIKRYDEHHQDLTLLKALVRQQLPEKYKEIFFDQSKNGYAGYIDGGASQEEFYKFIKPILEKMDGTEELLVKLNREDLLRKQRTFDNGSIPHQIHLGELHAILRRQEDFYPFLKDNREKIEKILTFRIPYYVGPLARGNSRFAWMTRKSEETITPWNFEEVVDKGASAQSFIERMTNFDKNLPNEKVLPKHSLLYEYFTVYNELTKVKYVTEGMRKPAFLSGEQKKAIVDLLFKTNRKVTVKQLKEDYFKKIECFDSVEISGVEDRFNASLGTYHDLLKIIKDKDFLDNEENEDILEDIVLTLTLFEDREMIEERLKTYAHLFDDKVMKQLKRRRYTGWGRLSRKLINGIRDKQSGKTILDFLKSDGFANRNFMQLIHDDSLTFKEDIQKAQVSGQGDSLHEHIANLAGSPAIKKGILQTVKVVDELVKVMGRHKPENIVIEMARENQTTQKGQKNSRERMKRIEEGIKELGSQILKEHPVENTQLQNEKLYLYYLQNGRDMYVDQELDINRLSDYDVDHIVPQSFLKDDSIDNKVLTRSDKNRGKSDNVPSEEVVKKMKNYWRQLLNAKLITQRKFDNLTKAERGGLSELDKAGFIKRQLVETRQITKHVAQILDSRMNTKYDENDKLIREVKVITLKSKLVSDFRKDFQFYKVREINNYHHAHDAYLNAVVGTALIKKYPKLESEFVYGDYKVYDVRKMIGSSGSETPGTSESATPESSGSEVEFSHEYWMRHALTLAKRARDEREVPVGAVLVLNNRVIGEGWNRAIGLHDPTAHAEIMALRQGGLVMQNYRLIDATLYVTFEPCVMCAGAMIHSRIGRVVFGVRNAKTGAAGSLMDVLHYPGMNHRVEITEGILADECAALLCYFFRMPRQVFNAQKKAQSSTDAKSEQEIGKATAKYFFYSNIMNFFKTEITLANGEIRKRPLIETNGETGEIVWDKGRDFATVRKVLSMPQVNIVKKTEVQTGGFSKESILPKRNSDKLIARKKDWDPKKYGGFDSPTVAYSVLVVAKVEKGKSKKLKSVKELLGITIMERSSFEKNPIDFLEAKGYKEVKKDLIIKLPKYSLFELENGRKRMLASAGELQKGNELALPSKYVNFLYLASHYEKLKGSPEDNEQKQLFVEQHKHYLDEIIEQISEFSKRVILADANLDKVLSAYNKHRDKPIREQAENIIHLFTLTNLGAPAAFKYFDTTIDRKRYTSTKEVLDATLIHQSITGLYETRIDLSQLGGD

SEQ ID NO: 265 - protein, 1554 aa, synthetic construct
  REGION 1..1554: note = 103 Cas9 TadAins 1029 polypeptide sequence
MDKKYSIGLAIGTNSVGWAVITDEYKVPSKKFKVLGNTDRHSIKKNLIGALLFDSGETAEATRLKRTARRRYTRRKNRICYLQEIFSNEMAKVDDSFFHRLEESFLVEEDKKHERHPIFGNIVDEVAYHEKYPTIYHLRKKLVDSTDKADLRLIYLALAHMIKFRGHFLIEGDLNPDNSDVDKLFIQLVQTYNQLFEENPINASGVDAKAILSARLSKSRRLENLIAQLPGEKKNGLFGNLIALSLGLTPNFKSNFDLAEDAKLQLSKDTYDDDLDNLLAQIGDQYADLFLAAKNLSDAILLSDILRVNTEITKAPLSASMIKRYDEHHQDLTLLKALVRQQLPEKYKEIFFDQSKNGYAGYIDGGASQEEFYKFIKPILEKMDGTEELLVKLNREDLLRKQRTFDNGSIPHQIHLGELHAILRRQEDFYPFLKDNREKIEKILTFRIPYYVGPLARGNSRFAWMTRKSEETITPWNFEEVVDKGASAQSFIERMTNFDKNLPNEKVLPKHSLLYEYFTVYNELTKVKYVTEGMRKPAFLSGEQKKAIVDLLFKTNRKVTVKQLKEDYFKKIECFDSVEISGVEDRFNASLGTYHDLLKIIKDKDFLDNEENEDILEDIVLTLTLFEDREMIEERLKTYAHLFDDKVMKQLKRRRYTGWGRLSRKLINGIRDKQSGKTILDFLKSDGFANRNFMQLIHDDSLTFKEDIQKAQVSGQGDSLHEHIANLAGSPAIKKGILQTVKVVDELVKVMGRHKPENIVIEMARENQTTQKGQKNSRERMKRIEEGIKELGSQILKEHPVENTQLQNEKLYLYYLQNGRDMYVDQELDINRLSDYDVDHIVPQSFLKDDSIDNKVLTRSDKNRGKSDNVPSEEVVKKMKNYWRQLLNAKLITQRKFDNLTKAERGGLSELDKAGFIKRQLVETRQITKHVAQILDSRMNTKYDENDKLIREVKVITLKSKLVSDFRKDFQFYKVREINNYHHAHDAYLNAVVGTALIKKYPKLESEFVYGDYKVYDVRKMIAKSEQEIGSSGSETPGTSESATPESSGSEVEFSHEYWMRHALTLAKRARDEREVPVGAVLVLNNRVIGEGWNRAIGLHDPTAHAEIMALRQGGLVMQNYRLIDATLYVTFEPCVMCAGAMIHSRIGRVVFGVRNAKTGAAGSLMDVLHYPGMNHRVEITEGILADECAALLCYFFRMPRQVFNAQKKAQSSTDGKATAKYFFYSNIMNFFKTEITLANGEIRKRPLIETNGETGEIVWDKGRDFATVRKVLSMPQVNIVKKTEVQTGGFSKESILPKRNSDKLIARKKDWDPKKYGGFDSPTVAYSVLVVAKVEKGKSKKLKSVKELLGITIMERSSFEKNPIDFLEAKGYKEVKKDLIIKLPKYSLFELENGRKRMLASAGELQKGNELALPSKYVNFLYLASHYEKLKGSPEDNEQKQLFVEQHKHYLDEIIEQISEFSKRVILADANLDKVLSAYNKHRDKPIREQAENIIHLFTLTNLGAPAAFKYFDTTIDRKRYTSTKEVLDATLIHQSITGLYETRIDLSQLGGD

SEQ ID NO: 266 - protein, 1554 aa, synthetic construct
  REGION 1..1554: note = 103 Cas9 TadAins 1040 polypeptide sequence
MDKKYSIGLAIGTNSVGWAVITDEYKVPSKKFKVLGNTDRHSIKKNLIGALLFDSGETAEATRLKRTARRRYTRRKNRICYLQEIFSNEMAKVDDSFFHRLEESFLVEEDKKHERHPIFGNIVDEVAYHEKYPTIYHLRKKLVDSTDKADLRLIYLALAHMIKFRGHFLIEGDLNPDNSDVDKLFIQLVQTYNQLFEENPINASGVDAKAILSARLSKSRRLENLIAQLPGEKKNGLFGNLIALSLGLTPNFKSNFDLAEDAKLQLSKDTYDDDLDNLLAQIGDQYADLFLAAKNLSDAILLSDILRVNTEITKAPLSASMIKRYDEHHQDLTLLKALVRQQLPEKYKEIFFDQSKNGYAGYIDGGASQEEFYKFIKPILEKMDGTEELLVKLNREDLLRKQRTFDNGSIPHQIHLGELHAILRRQEDFYPFLKDNREKIEKILTFRIPYYVGPLARGNSRFAWMTRKSEETITPWNFEEVVDKGASAQSFIERMTNFDKNLPNEKVLPKHSLLYEYFTVYNELTKVKYVTEGMRKPAFLSGEQKKAIVDLLFKTNRKVTVKQLKEDYFKKIECFDSVEISGVEDRFNASLGTYHDLLKIIKDKDFLDNEENEDILEDIVLTLTLFEDREMIEERLKTYAHLFDDKVMKQLKRRRYTGWGRLSRKLINGIRDKQSGKTILDFLKSDGFANRNFMQLIHDDSLTFKEDIQKAQVSGQGDSLHEHIANLAGSPAIKKGILQTVKVVDELVKVMGRHKPENIVIEMARENQTTQKGQKNSRERMKRIEEGIKELGSQILKEHPVENTQLQNEKLYLYYLQNGRDMYVDQELDINRLSDYDVDHIVPQSFLKDDSIDNKVLTRSDKNRGKSDNVPSEEVVKKMKNYWRQLLNAKLITQRKFDNLTKAERGGLSELDKAGFIKRQLVETRQITKHVAQILDSRMNTKYDENDKLIREVKVITLKSKLVSDFRKDFQFYKVREINNYHHAHDAYLNAVVGTALIKKYPKLESEFVYGDYKVYDVRKMIAKSEQEIGKATAKYFFYSGSSGSETPGTSESATPESSGSEVEFSHEYWMRHALTLAKRARDEREVPVGAVLVLNNRVIGEGWNRAIGLHDPTAHAEIMALRQGGLVMQNYRLIDATLYVTFEPCVMCAGAMIHSRIGRVVFGVRNAKTGAAGSLMDVLHYPGMNHRVEITEGILADECAALLCYFFRMPRQVFNAQKKAQSSTDNIMNFFKTEITLANGEIRKRPLIETNGETGEIVWDKGRDFATVRKVLSMPQVNIVKKTEVQTGGFSKESILPKRNSDKLIARKKDWDPKKYGGFDSPTVAYSVLVVAKVEKGKSKKLKSVKELLGITIMERSSFEKNPIDFLEAKGYKEVKKDLIIKLPKYSLFELENGRKRMLASAGELQKGNELALPSKYVNFLYLASHYEKLKGSPEDNEQKQLFVEQHKHYLDEIIEQISEFSKRVILADANLDKVLSAYNKHRDKPIREQAENIIHLFTLTNLGAPAAFKYFDTTIDRKRYTSTKEVLDATLIHQSITGLYETRIDLSQLGGD

SEQ ID NO: 267 - protein, 1554 aa, synthetic construct
  REGION 1..1554: note = 105 Cas9 TadAins 1068 polypeptide sequence
MDKKYSIGLAIGTNSVGWAVITDEYKVPSKKFKVLGNTDRHSIKKNLIGALLFDSGETAEATRLKRTARRRYTRRKNRICYLQEIFSNEMAKVDDSFFHRLEESFLVEEDKKHERHPIFGNIVDEVAYHEKYPTIYHLRKKLVDSTDKADLRLIYLALAHMIKFRGHFLIEGDLNPDNSDVDKLFIQLVQTYNQLFEENPINASGVDAKAILSARLSKSRRLENLIAQLPGEKKNGLFGNLIALSLGLTPNFKSNFDLAEDAKLQLSKDTYDDDLDNLLAQIGDQYADLFLAAKNLSDAILLSDILRVNTEITKAPLSASMIKRYDEHHQDLTLLKALVRQQLPEKYKEIFFDQSKNGYAGYIDGGASQEEFYKFIKPILEKMDGTEELLVKLNREDLLRKQRTFDNGSIPHQIHLGELHAILRRQEDFYPFLKDNREKIEKILTFRIPYYVGPLARGNSRFAWMTRKSEETITPWNFEEVVDKGASAQSFIERMTNFDKNLPNEKVLPKHSLLYEYFTVYNELTKVKYVTEGMRKPAFLSGEQKKAIVDLLFKTNRKVTVKQLKEDYFKKIECFDSVEISGVEDRFNASLGTYHDLLKIIKDKDFLDNEENEDILEDIVLTLTLFEDREMIEERLKTYAHLFDDKVMKQLKRRRYTGWGRLSRKLINGIRDKQSGKTILDFLKSDGFANRNFMQLIHDDSLTFKEDIQKAQVSGQGDSLHEHIANLAGSPAIKKGILQTVKVVDELVKVMGRHKPENIVIEMARENQTTQKGQKNSRERMKRIEEGIKELGSQILKEHPVENTQLQNEKLYLYYLQNGRDMYVDQELDINRLSDYDVDHIVPQSFLKDDSIDNKVLTRSDKNRGKSDNVPSEEVVKKMKNYWRQLLNAKLITQRKFDNLTKAERGGLSELDKAGFIKRQLVETRQITKHVAQILDSRMNTKYDENDKLIREVKVITLKSKLVSDFRKDFQFYKVREINNYHHAHDAYLNAVVGTALIKKYPKLESEFVYGDYKVYDVRKMIAKSEQEIGKATAKYFFYSNIMNFFKTEITLANGEIRKRPLIETNGEGSSGSETPGTSESATPESSGSEVEFSHEYWMRHALTLAKRARDEREVPVGAVLVLNNRVIGEGWNRAIGLHDPTAHAEIMALRQGGLVMQNYRLIDATLYVTFEPCVMCAGAMIHSRIGRVVFGVRNAKTGAAGSLMDVLHYPGMNHRVEITEGILADECAALLCYFFRMPRQVFNAQKKAQSSTDTGEIVWDKGRDFATVRKVLSMPQVNIVKKTEVQTGGFSKESILPKRNSDKLIARKKDWDPKKYGGFDSPTVAYSVLVVAKVEKGKSKKLKSVKELLGITIMERSSFEKNPIDFLEAKGYKEVKKDLIIKLPKYSLFELENGRKRMLASAGELQKGNELALPSKYVNFLYLASHYEKLKGSPEDNEQKQLFVEQHKHYLDEIIEQISEFSKRVILADANLDKVLSAYNKHRDKPIREQAENIIHLFTLTNLGAPAAFKYFDTTIDRKRYTSTKEVLDATLIHQSITGLYETRIDLSQLGGD

SEQ ID NO: 268 - protein, 1554 aa, synthetic construct
  REGION 1..1554: note = 106 Cas9 TadAins 1247 polypeptide sequence
MDKKYSIGLAIGTNSVGWAVITDEYKVPSKKFKVLGNTDRHSIKKNLIGALLFDSGETAEATRLKRTARRRYTRRKNRICYLQEIFSNEMAKVDDSFFHRLEESFLVEEDKKHERHPIFGNIVDEVAYHEKYPTIYHLRKKLVDSTDKADLRLIYLALAHMIKFRGHFLIEGDLNPDNSDVDKLFIQLVQTYNQLFEENPINASGVDAKAILSARLSKSRRLENLIAQLPGEKKNGLFGNLIALSLGLTPNFKSNFDLAEDAKLQLSKDTYDDDLDNLLAQIGDQYADLFLAAKNLSDAILLSDILRVNTEITKAPLSASMIKRYDEHHQDLTLLKALVRQQLPEKYKEIFFDQSKNGYAGYIDGGASQEEFYKFIKPILEKMDGTEELLVKLNREDLLRKQRTFDNGSIPHQIHLGELHAILRRQEDFYPFLKDNREKIEKILTFRIPYYVGPLARGNSRFAWMTRKSEETITPWNFEEVVDKGASAQSFIERMTNFDKNLPNEKVLPKHSLLYEYFTVYNELTKVKYVTEGMRKPAFLSGEQKKAIVDLLFKTNRKVTVKQLKEDYFKKIECFDSVEISGVEDRFNASLGTYHDLLKIIKDKDFLDNEENEDILEDIVLTLTLFEDREMIEERLKTYAHLFDDKVMKQLKRRRYTGWGRLSRKLINGIRDKQSGKTILDFLKSDGFANRNFMQLIHDDSLTFKEDIQKAQVSGQGDSLHEHIANLAGSPAIKKGILQTVKVVDELVKVMGRHKPENIVIEMARENQTTQKGQKNSRERMKRIEEGIKELGSQILKEHPVENTQLQNEKLYLYYLQNGRDMYVDQELDINRLSDYDVDHIVPQSFLKDDSIDNKVLTRSDKNRGKSDNVPSEEVVKKMKNYWRQLLNAKLITQRKFDNLTKAERGGLSELDKAGFIKRQLVETRQITKHVAQILDSRMNTKYDENDKLIREVKVITLKSKLVSDFRKDFQFYKVREINNYHHAHDAYLNAVVGTALIKKYPKLESEFVYGDYKVYDVRKMIAKSEQEIGKATAKYFFYSNIMNFFKTEITLANGEIRKRPLIETNGETGEIVWDKGRDFATVRKVLSMPQVNIVKKTEVQTGGFSKESILPKRNSDKLIARKKDWDPKKYGGFDSPTVAYSVLVVAKVEKGKSKKLKSVKELLGITIMERSSFEKNPIDFLEAKGYKEVKKDLIIKLPKYSLFELENGRKRMLASAGELQKGNELALPSKYVNFLYLASHYEKLKGGSSGSETPGTSESATPESSGSEVEFSHEYWMRHALTLAKRARDEREVPVGAVLVLNNRVIGEGWNRAIGLHDPTAHAEIMALRQGGLVMQNYRLIDATLYVTFEPCVMCAGAMIHSRIGRVVFGVRNAKTGAAGSLMDVLHYPGMNHRVEITEGILADECAALLCYFFRMPRQVFNAQKKAQSSTDSPEDNEQKQLFVEQHKHYLDEIIEQISEFSKRVILADANLDKVLSAYNKHRDKPIREQAENIIHLFTLTNLGAPAAFKYFDTTIDRKRYTSTKEVLDATLIHQSITGLYETRIDLSQLGGD

SEQ ID NO: 269 - protein, 1554 aa, synthetic construct
  REGION 1..1554: note = 107 Cas9 TadAins 1054 polypeptide sequence
MDKKYSIGLAIGTNSVGWAVITDEYKVPSKKFKVLGNTDRHSIKKNLIGALLFDSGETAEATRLKRTARRRYTRRKNRICYLQEIFSNEMAKVDDSFFHRLEESFLVEEDKKHERHPIFGNIVDEVAYHEKYPTIYHLRKKLVDSTDKADLRLIYLALAHMIKFRGHFLIEGDLNPDNSDVDKLFIQLVQTYNQLFEENPINASGVDAKAILSARLSKSRRLENLIAQLPGEKKNGLFGNLIALSLGLTPNFKSNFDLAEDAKLQLSKDTYDDDLDNLLAQIGDQYADLFLAAKNLSDAILLSDILRVNTEITKAPLSASMIKRYDEHHQDLTLLKALVRQQLPEKYKEIFFDQSKNGYAGYIDGGASQEEFYKFIKPILEKMDGTEELLVKLNREDLLRKQRTFDNGSIPHQIHLGELHAILRRQEDFYPFLKDNREKIEKILTFRIPYYVGPLARGNSRFAWMTRKSEETITPWNFEEVVDKGASAQSFIERMTNFDKNLPNEKVLPKHSLLYEYFTVYNELTKVKYVTEGMRKPAFLSGEQKKAIVDLLFKTNRKVTVKQLKEDYFKKIECFDSVEISGVEDRFNASLGTYHDLLKIIKDKDFLDNEENEDILEDIVLTLTLFEDREMIEERLKTYAHLFDDKVMKQLKRRRYTGWGRLSRKLINGIRDKQSGKTILDFLKSDGFANRNFMQLIHDDSLTFKEDIQKAQVSGQGDSLHEHIANLAGSPAIKKGILQTVKVVDELVKVMGRHKPENIVIEMARENQTTQKGQKNSRERMKRIEEGIKELGSQILKEHPVENTQLQNEKLYLYYLQNGRDMYVDQELDINRLSDYDVDHIVPQSFLKDDSIDNKVLTRSDKNRGKSDNVPSEEVVKKMKNYWRQLLNAKLITQRKFDNLTKAERGGLSELDKAGFIKRQLVETRQITKHVAQILDSRMNTKYDENDKLIREVKVITLKSKLVSDFRKDFQFYKVREINNYHHAHDAYLNAVVGTALIKKYPKLESEFVYGDYKVYDVRKMIAKSEQEIGKATAKYFFYSNIMNFFKTEITLANGSSGSETPGTSESATPESSGSEVEFSHEYWMRHALTLAKRARDEREVPVGAVLVLNNRVIGEGWNRAIGLHDPTAHAEIMALRQGGLVMQNYRLIDATLYVTFEPCVMCAGAMIHSRIGRVVFGVRNAKTGAAGSLMDVLHYPGMNHRVEITEGILADECAALLCYFFRMPRQVFNAQKKAQSSTDGEIRKRPLIETNGETGEIVWDKGRDFATVRKVLSMPQVNIVKKTEVQTGGFSKESILPKRNSDKLIARKKDWDPKKYGGFDSPTVAYSVLVVAKVEKGKSKKLKSVKELLGITIMERSSFEKNPIDFLEAKGYKEVKKDLIIKLPKYSLFELENGRKRMLASAGELQKGNELALPSKYVNFLYLASHYEKLKGSPEDNEQKQLFVEQHKHYLDEIIEQISEFSKRVILADANLDKVLSAYNKHRDKPIREQAENIIHLFTLTNLGAPAAFKYFDTTIDRKRYTSTKEVLDATLIHQSITGLYETRIDLSQLGGD

SEQ ID NO: 270 - protein, 1554 aa, synthetic construct
  REGION 1..1554: note = 108 Cas9 TadAins 1026 polypeptide sequence
MDKKYSIGLAIGTNSVGWAVITDEYKVPSKKFKVLGNTDRHSIKKNLIGALLFDSGETAEATRLKRTARRRYTRRKNRICYLQEIFSNEMAKVDDSFFHRLEESFLVEEDKKHERHPIFGNIVDEVAYHEKYPTIYHLRKKLVDSTDKADLRLIYLALAHMIKFRGHFLIEGDLNPDNSDVDKLFIQLVQTYNQLFEENPINASGVDAKAILSARLSKSRRLENLIAQLPGEKKNGLFGNLIALSLGLTPNFKSNFDLAEDAKLQLSKDTYDDDLDNLLAQIGDQYADLFLAAKNLSDAILLSDILRVNTEITKAPLSASMIKRYDEHHQDLTLLKALVRQQLPEKYKEIFFDQSKNGYAGYIDGGASQEEFYKFIKPILEKMDGTEELLVKLNREDLLRKQRTFDNGSIPHQIHLGELHAILRRQEDFYPFLKDNREKIEKILTFRIPYYVGPLARGNSRFAWMTRKSEETITPWNFEEVVDKGASAQSFIERMTNFDKNLPNEKVLPKHSLLYEYFTVYNELTKVKYVTEGMRKPAFLSGEQKKAIVDLLFKTNRKVTVKQLKEDYFKKIECFDSVEISGVEDRFNASLGTYHDLLKIIKDKDFLDNEENEDILEDIVLTLTLFEDREMIEERLKTYAHLFDDKVMKQLKRRRYTGWGRLSRKLINGIRDKQSGKTILDFLKSDGFANRNFMQLIHDDSLTFKEDIQKAQVSGQGDSLHEHIANLAGSPAIKKGILQTVKVVDELVKVMGRHKPENIVIEMARENQTTQKGQKNSRERMKRIEEGIKELGSQILKEHPVENTQLQNEKLYLYYLQNGRDMYVDQELDINRLSDYDVDHIVPQSFLKDDSIDNKVLTRSDKNRGKSDNVPSEEVVKKMKNYWRQLLNAKLITQRKFDNLTKAERGGLSELDKAGFIKRQLVETRQITKHVAQILDSRMNTKYDENDKLIREVKVITLKSKLVSDFRKDFQFYKVREINNYHHAHDAYLNAVVGTALIKKYPKLESEFVYGDYKVYDVRKMIAKSEGSSGSETPGTSESATPESSGSEVEFSHEYWMRHALTLAKRARDEREVPVGAVLVLNNRVIGEGWNRAIGLHDPTAHAEIMALRQGGLVMQNYRLIDATLYVTFEPCVMCAGAMIHSRIGRVVFGVRNAKTGAAGSLMDVLHYPGMNHRVEITEGILADECAALLCYFFRMPRQVFNAQKKAQSSTDQEIGKATAKYFFYSNIMNFFKTEITLANGEIRKRPLIETNGETGEIVWDKGRDFATVRKVLSMPQVNIVKKTEVQTGGFSKESILPKRNSDKLIARKKDWDPKKYGGFDSPTVAYSVLVVAKVEKGKSKKLKSVKELLGITIMERSSFEKNPIDFLEAKGYKEVKKDLIIKLPKYSLFELENGRKRMLASAGELQKGNELALPSKYVNFLYLASHYEKLKGSPEDNEQKQLFVEQHKHYLDEIIEQISEFSKRVILADANLDKVLSAYNKHRDKPIREQAENIIHLFTLTNLGAPAAFKYFDTTIDRKRYTSTKEVLDATLIHQSITGLYETRIDLSQLGGD

SEQ ID NO: 271 - protein, 1540 aa, synthetic construct
  REGION 1..1540: note = 109 Cas9 TadAins 768 polypeptide sequence
MDKKYSIGLAIGTNSVGWAVITDEYKVPSKKFKVLGNTDRHSIKKNLIGALLFDSGETAEATRLKRTARRRYTRRKNRICYLQEIFSNEMAKVDDSFFHRLEESFLVEEDKKHERHPIFGNIVDEVAYHEKYPTIYHLRKKLVDSTDKADLRLIYLALAHMIKFRGHFLIEGDLNPDNSDVDKLFIQLVQTYNQLFEENPINASGVDAKAILSARLSKSRRLENLIAQLPGEKKNGLFGNLIALSLGLTPNFKSNFDLAEDAKLQLSKDTYDDDLDNLLAQIGDQYADLFLAAKNLSDAILLSDILRVNTEITKAPLSASMIKRYDEHHQDLTLLKALVRQQLPEKYKEIFFDQSKNGYAGYIDGGASQEEFYKFIKPILEKMDGTEELLVKLNREDLLRKQRTFDNGSIPHQIHLGELHAILRRQEDFYPFLKDNREKIEKILTFRIPYYVGPLARGNSRFAWMTRKSEETITPWNFEEVVDKGASAQSFIERMTNFDKNLPNEKVLPKHSLLYEYFTVYNELTKVKYVTEGMRKPAFLSGEQKKAIVDLLFKTNRKVTVKQLKEDYFKKIECFDSVEISGVEDRFNASLGTYHDLLKIIKDKDFLDNEENEDILEDIVLTLTLFEDREMIEERLKTYAHLFDDKVMKQLKRRRYTGWGRLSRKLINGIRDKQSGKTILDFLKSDGFANRNFMQLIHDDSLTFKEDIQKAQVSGQGDSLHEHIANLAGSPAIKKGILQTVKVVDELVKVMGRHKPENIVIEMARENQGSSGSETPGTSESATPESSGSEVEFSHEYWMRHALTLAKRARDEREVPVGAVLVLNNRVIGEGWNRAIGLHDPTAHAEIMALRQGGLVMQNYRLIDATLYVTFEPCVMCAGAMIHSRIGRVVFGVRNAKTGAAGSLMDVLHYPGMNHRVEITEGILADECAALLCYFFRMPRTTQKGQKNSRERMKRIEEGIKELGSQILKEHPVENTQLQNEKLYLYYLQNGRDMYVDQELDINRLSDYDVDHIVPQSFLKDDSIDNKVLTRSDKNRGKSDNVPSEEVVKKMKNYWRQLLNAKLITQRKFDNLTKAERGGLSELDKAGFIKRQLVETRQITKHVAQILDSRMNTKYDENDKLIREVKVITLKSKLVSDFRKDFQFYKVREINNYHHAHDAYLNAVVGTALIKKYPKLESEFVYGDYKVYDVRKMIAKSEQEIGKATAKYFFYSNIMNFFKTEITLANGEIRKRPLIETNGETGEIVWDKGRDFATVRKVLSMPQVNIVKKTEVQTGGFSKESILPKRNSDKLIARKKDWDPKKYGGFDSPTVAYSVLVVAKVEKGKSKKLKSVKELLGITIMERSSFEKNPIDFLEAKGYKEVKKDLIIKLPKYSLFELENGRKRMLASAGELQKGNELALPSKYVNFLYLASHYEKLKGSPEDNEQKQLFVEQHKHYLDEIIEQISEFSKRVILADANLDKVLSAYNKHRDKPIREQAENIIHLFTLTNLGAPAAFKYFDTTIDRKRYTSTKEVLDATLIHQSITGLYETRIDLSQLGGD

SEQ ID NO: 272 - protein, 1540 aa, synthetic construct
  REGION 1..1540: note = 110.1 Cas9 TadAins 1250 polypeptide sequence
MDKKYSIGLAIGTNSVGWAVITDEYKVPSKKFKVLGNTDRHSIKKNLIGALLFDSGETAEATRLKRTARRRYTRRKNRICYLQEIFSNEMAKVDDSFFHRLEESFLVEEDKKHERHPIFGNIVDEVAYHEKYPTIYHLRKKLVDSTDKADLRLIYLALAHMIKFRGHFLIEGDLNPDNSDVDKLFIQLVQTYNQLFEENPINASGVDAKAILSARLSKSRRLENLIAQLPGEKKNGLFGNLIALSLGLTPNFKSNFDLAEDAKLQLSKDTYDDDLDNLLAQIGDQYADLFLAAKNLSDAILLSDILRVNTEITKAPLSASMIKRYDEHHQDLTLLKALVRQQLPEKYKEIFFDQSKNGYAGYIDGGASQEEFYKFIKPILEKMDGTEELLVKLNREDLLRKQRTFDNGSIPHQIHLGELHAILRRQEDFYPFLKDNREKIEKILTFRIPYYVGPLARGNSRFAWMTRKSEETITPWNFEEVVDKGASAQSFIERMTNFDKNLPNEKVLPKHSLLYEYFTVYNELTKVKYVTEGMRKPAFLSGEQKKAIVDLLFKTNRKVTVKQLKEDYFKKIECFDSVEISGVEDRFNASLGTYHDLLKIIKDKDFLDNEENEDILEDIVLTLTLFEDREMIEERLKTYAHLFDDKVMKQLKRRRYTGWGRLSRKLINGIRDKQSGKTILDFLKSDGFANRNFMQLIHDDSLTFKEDIQKAQVSGQGDSLHEHIANLAGSPAIKKGILQTVKVVDELVKVMGRHKPENIVIEMARENQTTQKGQKNSRERMKRIEEGIKELGSQILKEHPVENTQLQNEKLYLYYLQNGRDMYVDQELDINRLSDYDVDHIVPQSFLKDDSIDNKVLTRSDKNRGKSDNVPSEEVVKKMKNYWRQLLNAKLITQRKFDNLTKAERGGLSELDKAGFIKRQLVETRQITKHVAQILDSRMNTKYDENDKLIREVKVITLKSKLVSDFRKDFQFYKVREINNYHHAHDAYLNAVVGTALIKKYPKLESEFVYGDYKVYDVRKMIAKSEQEIGKATAKYFFYSNIMNFFKTEITLANGEIRKRPLIETNGETGEIVWDKGRDFATVRKVLSMPQVNIVKKTEVQTGGFSKESILPKRNSDKLIARKKDWDPKKYGGFDSPTVAYSVLVVAKVEKGKSKKLKSVKELLGITIMERSSFEKNPIDFLEAKGYKEVKKDLIIKLPKYSLFELENGRKRMLASAGELQKGNELALPSKYVNFLYLASHYEKLKGSPGSSGSETPGTSESATPESSGSEVEFSHEYWMRHALTLAKRARDEREVPVGAVLVLNNRVIGEGWNRAIGLHDPTAHAEIMALRQGGLVMQNYRLIDATLYVTFEPCVMCAGAMIHSRIGRVVFGVRNAKTGAAGSLMDVLHYPGMNHRVEITEGILADECAALLCYFFRMPREDNEQKQLFVEQHKHYLDEIIEQISEFSKRVILADANLDKVLSAYNKHRDKPIREQAENIIHLFTLTNLGAPAAFKYFDTTIDRKRYTSTKEVLDATLIHQSITGLYETRIDLSQLGGD

SEQ ID NO: 273 - protein, 1543 aa, synthetic construct
  REGION 1..1543: note = 110.2 Cas9 TadAins 1250 polypeptide sequence
MDKKYSIGLAIGTNSVGWAVITDEYKVPSKKFKVLGNTDRHSIKKNLIGALLFDSGETAEATRLKRTARRRYTRRKNRICYLQEIFSNEMAKVDDSFFHRLEESFLVEEDKKHERHPIFGNIVDEVAYHEKYPTIYHLRKKLVDSTDKADLRLIYLALAHMIKFRGHFLIEGDLNPDNSDVDKLFIQLVQTYNQLFEENPINASGVDAKAILSARLSKSRRLENLIAQLPGEKKNGLFGNLIALSLGLTPNFKSNFDLAEDAKLQLSKDTYDDDLDNLLAQIGDQYADLFLAAKNLSDAILLSDILRVNTEITKAPLSASMIKRYDEHHQDLTLLKALVRQQLPEKYKEIFFDQSKNGYAGYIDGGASQEEFYKFIKPILEKMDGTEELLVKLNREDLLRKQRTFDNGSIPHQIHLGELHAILRRQEDFYPFLKDNREKIEKILTFRIPYYVGPLARGNSRFAWMTRKSEETITPWNFEEVVDKGASAQSFIERMTNFDKNLPNEKVLPKHSLLYEYFTVYNELTKVKYVTEGMRKPAFLSGEQKKAIVDLLFKTNRKVTVKQLKEDYFKKIECFDSVEISGVEDRFNASLGTYHDLLKIIKDKDFLDNEENEDILEDIVLTLTLFEDREMIEERLKTYAHLFDDKVMKQLKRRRYTGWGRLSRKLINGIRDKQSGKTILDFLKSDGFANRNFMQLIHDDSLTFKEDIQKAQVSGQGDSLHEHIANLAGSPAIKKGILQTVKVVDELVKVMGRHKPENIVIEMARENQTTQKGQKNSRERMKRIEEGIKELGSQILKEHPVENTQLQNEKLYLYYLQNGRDMYVDQELDINRLSDYDVDHIVPQSFLKDDSIDNKVLTRSDKNRGKSDNVPSEEVVKKMKNYWRQLLNAKLITQRKFDNLTKAERGGLSELDKAGFIKRQLVETRQITKHVAQILDSRMNTKYDENDKLIREVKVITLKSKLVSDFRKDFQFYKVREINNYHHAHDAYLNAVVGTALIKKYPKLESEFVYGDYKVYDVRKMIAKSEQEIGKATAKYFFYSNIMNFFKTEITLANGEIRKRPLIETNGETGEIVWDKGRDFATVRKVLSMPQVNIVKKTEVQTGGFSKESILPKRNSDKLIARKKDWDPKKYGGFDSPTVAYSVLVVAKVEKGKSKKLKSVKELLGITIMERSSFEKNPIDFLEAKGYKEVKKDLIIKLPKYSLFELENGRKRMLASAGELQKGNELALPSKYVNFLYLASHYEKLKGSPGSSGSSGSETPGTSESATPESSGSEVEFSHEYWMRHALTLAKRARDEREVPVGAVLVLNNRVIGEGWNRAIGLHDPTAHAEIMALRQGGLVMQNYRLIDATLYVTFEPCVMCAGAMIHSRIGRVVFGVRNAKTGAAGSLMDVLHYPGMNHRVEITEGILADECAALLCYFFRMPREDNEQKQLFVEQHKHYLDEIIEQISEFSKRVILADANLDKVLSAYNKHRDKPIREQAENIIHLFTLTNLGAPAAFKYFDTTIDRKRYTSTKEVLDATLIHQSITGLYETRIDLSQLGGD

SEQ ID NO: 274 - protein, 1546 aa, synthetic construct
  REGION 1..1546: note = 110.3 Cas9 TadAins 1250 polypeptide sequence
MDKKYSIGLAIGTNSVGWAVITDEYKVPSKKFKVLGNTDRHSIKKNLIGALLFDSGETAEATRLKRTARRRYTRRKNRICYLQEIFSNEMAKVDDSFFHRLEESFLVEEDKKHERHPIFGNIVDEVAYHEKYPTIYHLRKKLVDSTDKADLRLIYLALAHMIKFRGHFLIEGDLNPDNSDVDKLFIQLVQTYNQLFEENPINASGVDAKAILSARLSKSRRLENLIAQLPGEKKNGLFGNLIALSLGLTPNFKSNFDLAEDAKLQLSKDTYDDDLDNLLAQIGDQYADLFLAAKNLSDAILLSDILRVNTEITKAPLSASMIKRYDEHHQDLTLLKALVRQQLPEKYKEIFFDQSKNGYAGYIDGGASQEEFYKFIKPILEKMDGTEELLVKLNREDLLRKQRTFDNGSIPHQIHLGELHAILRRQEDFYPFLKDNREKIEKILTFRIPYYVGPLARGNSRFAWMTRKSEETITPWNFEEVVDKGASAQSFIERMTNFDKNLPNEKVLPKHSLLYEYFTVYNELTKVKYVTEGMRKPAFLSGEQKKAIVDLLFKTNRKVTVKQLKEDYFKKIECFDSVEISGVEDRFNASLGTYHDLLKIIKDKDFLDNEENEDILEDIVLTLTLFEDREMIEERLKTYAHLFDDKVMKQLKRRRYTGWGRLSRKLINGIRDKQSGKTILDFLKSDGFANRNFMQLIHDDSLTFKEDIQKAQVSGQGDSLHEHIANLAGSPAIKKGILQTVKVVDELVKVMGRHKPENIVIEMARENQTTQKGQKNSRERMKRIEEGIKELGSQILKEHPVENTQLQNEKLYLYYLQNGRDMYVDQELDINRLSDYDVDHIVPQSFLKDDSIDNKVLTRSDKNRGKSDNVPSEEVVKKMKNYWRQLLNAKLITQRKFDNLTKAERGGLSELDKAGFIKRQLVETRQITKHVAQILDSRMNTKYDENDKLIREVKVITLKSKLVSDFRKDFQFYKVREINNYHHAHDAYLNAVVGTALIKKYPKLESEFVYGDYKVYDVRKMIAKSEQEIGKATAKYFFYSNIMNFFKTEITLANGEIRKRPLIETNGETGEIVWDKGRDFATVRKVLSMPQVNIVKKTEVQTGGFSKESILPKRNSDKLIARKKDWDPKKYGGFDSPTVAYSVLVVAKVEKGKSKKLKSVKELLGITIMERSSFEKNPIDFLEAKGYKEVKKDLIIKLPKYSLFELENGRKRMLASAGELQKGNELALPSKYVNFLYLASHYEKLKGSPGSSGSSGSETPGTSESATPESGSSSGSEVEFSHEYWMRHALTLAKRARDEREVPVGAVLVLNNRVIGEGWNRAIGLHDPTAHAEIMALRQGGLVMQNYRLIDATLYVTFEPCVMCAGAMIHSRIGRVVFGVRNAKTGAAGSLMDVLHYPGMNHRVEITEGILADECAALLCYFFRMPREDNEQKQLFVEQHKHYLDEIIEQISEFSKRVILADANLDKVLSAYNKHRDKPIREQAENIIHLFTLTNLGAPAAFKYFDTTIDRKRYTSTKEVLDATLIHQSITGLYETRIDLSQLGGD

SEQ ID NO: 275 - protein, 1546 aa, synthetic construct
  REGION 1..1546: note = 110.4 Cas9 TadAins 1250 polypeptide sequence
MDKKYSIGLAIGTNSVGWAVITDEYKVPSKKFKVLGNTDRHSIKKNLIGALLFDSGETAEATRLKRTARRRYTRRKNRICYLQEIFSNEMAKVDDSFFHRLEESFLVEEDKKHERHPIFGNIVDEVAYHEKYPTIYHLRKKLVDSTDKADLRLIYLALAHMIKFRGHFLIEGDLNPDNSDVDKLFIQLVQTYNQLFEENPINASGVDAKAILSARLSKSRRLENLIAQLPGEKKNGLFGNLIALSLGLTPNFKSNFDLAEDAKLQLSKDTYDDDLDNLLAQIGDQYADLFLAAKNLSDAILLSDILRVNTEITKAPLSASMIKRYDEHHQDLTLLKALVRQQLPEKYKEIFFDQSKNGYAGYIDGGASQEEFYKFIKPILEKMDGTEELLVKLNREDLLRKQRTFDNGSIPHQIHLGELHAILRRQEDFYPFLKDNREKIEKILTFRIPYYVGPLARGNSRFAWMTRKSEETITPWNFEEVVDKGASAQSFIERMTNFDKNLPNEKVLPKHSLLYEYFTVYNELTKVKYVTEGMRKPAFLSGEQKKAIVDLLFKTNRKVTVKQLKEDYFKKIECFDSVEISGVEDRFNASLGTYHDLLKIIKDKDFLDNEENEDILEDIVLTLTLFEDREMIEERLKTYAHLFDDKVMKQLKRRRYTGWGRLSRKLINGIRDKQSGKTILDFLKSDGFANRNFMQLIHDDSLTFKEDIQKAQVSGQGDSLHEHIANLAGSPAIKKGILQTVKVVDELVKVMGRHKPENIVIEMARENQTTQKGQKNSRERMKRIEEGIKELGSQILKEHPVENTQLQNEKLYLYYLQNGRDMYVDQELDINRLSDYDVDHIVPQSFLKDDSIDNKVLTRSDKNRGKSDNVPSEEVVKKMKNYWRQLLNAKLITQRKFDNLTKAERGGLSELDKAGFIKRQLVETRQITKHVAQILDSRMNTKYDENDKLIREVKVITLKSKLVSDFRKDFQFYKVREINNYHHAHDAYLNAVVGTALIKKYPKLESEFVYGDYKVYDVRKMIAKSEQEIGKATAKYFFYSNIMNFFKTEITLANGEIRKRPLIETNGETGEIVWDKGRDFATVRKVLSMPQVNIVKKTEVQTGGFSKESILPKRNSDKLIARKKDWDPKKYGGFDSPTVAYSVLVVAKVEKGKSKKLKSVKELLGITIMERSSFEKNPIDFLEAKGYKEVKKDLIIKLPKYSLFELENGRKRMLASAGELQKGNELALPSKYVNFLYLASHYEKLKGSPGSSGSSGSETPGTSESATPESGSSSGSEVEFSHEYWMRHALTLAKRARDEREVPVGAVLVLNNRVIGEGWNRAIGLHDPTAHAEIMALRQGGLVMQNYRLIDATLYVTFEPCVMCAGAMIHSRIGRVVFGVRNAKTGAAGSLMDVLHYPGMNHRVEITEGILADECAALLCYFFRMRREDNEQKQLFVEQHKHYLDEIIEQISEFSKRVILADANLDKVLSAYNKHRDKPIREQAENIIHLFTLTNLGAPAAFKYFDTTIDRKRYTSTKEVLDATLIHQSITGLYETRIDLSQLGGD

SEQ ID NO: 276 - protein, 1546 aa, synthetic construct
  REGION 1..1546: note = 110.5 Cas9 TadAins 1249 polypeptide sequence
MDKKYSIGLAIGTNSVGWAVITDEYKVPSKKFKVLGNTDRHSIKKNLIGALLFDSGETAEATRLKRTARRRYTRRKNRICYLQEIFSNEMAKVDDSFFHRLEESFLVEEDKKHERHPIFGNIVDEVAYHEKYPTIYHLRKKLVDSTDKADLRLIYLALAHMIKFRGHFLIEGDLNPDNSDVDKLFIQLVQTYNQLFEENPINASGVDAKAILSARLSKSRRLENLIAQLPGEKKNGLFGNLIALSLGLTPNFKSNFDLAEDAKLQLSKDTYDDDLDNLLAQIGDQYADLFLAAKNLSDAILLSDILRVNTEITKAPLSASMIKRYDEHHQDLTLLKALVRQQLPEKYKEIFFDQSKNGYAGYIDGGASQEEFYKFIKPILEKMDGTEELLVKLNREDLLRKQRTFDNGSIPHQIHLGELHAILRRQEDFYPFLKDNREKIEKILTFRIPYYVGPLARGNSRFAWMTRKSEETITPWNFEEVVDKGASAQSFIERMTNFDKNLPNEKVLPKHSLLYEYFTVYNELTKVKYVTEGMRKPAFLSGEQKKAIVDLLFKTNRKVTVKQLKEDYFKKIECFDSVEISGVEDRFNASLGTYHDLLKIIKDKDFLDNEENEDILEDIVLTLTLFEDREMIEERLKTYAHLFDDKVMKQLKRRRYTGWGRLSRKLINGIRDKQSGKTILDFLKSDGFANRNFMQLIHDDSLTFKEDIQKAQVSGQGDSLHEHIANLAGSPAIKKGILQTVKVVDELVKVMGRHKPENIVIEMARENQTTQKGQKNSRERMKRIEEGIKELGSQILKEHPVENTQLQNEKLYLYYLQNGRDMYVDQELDINRLSDYDVDHIVPQSFLKDDSIDNKVLTRSDKNRGKSDNVPSEEVVKKMKNYWRQLLNAKLITQRKFDNLTKAERGGLSELDKAGFIKRQLVETRQITKHVAQILDSRMNTKYDENDKLIREVKVITLKSKLVSDFRKDFQFYKVREINNYHHAHDAYLNAVVGTALIKKYPKLESEFVYGDYKVYDVRKMIAKSEQEIGKATAKYFFYSNIMNFFKTEITLANGEIRKRPLIETNGETGEIVWDKGRDFATVRKVLSMPQVNIVKKTEVQTGGFSKESILPKRNSDKLIARKKDWDPKKYGGFDSPTVAYSVLVVAKVEKGKSKKLKSVKELLGITIMERSSFEKNPIDFLEAKGYKEVKKDLIIKLPKYSLFELENGRKRMLASAGELQKGNELALPSKYVNFLYLASHYEKLKGSGSSGSSGSETPGTSESATPESGSSSGSEVEFSHEYWMRHALTLAKRARDEREVPVGAVLVLNNRVIGEGWNRAIGLHDPTAHAEIMALRQGGLVMQNYRLIDATLYVTFEPCVMCAGAMIHSRIGRVVFGVRNAKTGAAGSLMDVLHYPGMNHRVEITEGILADECAALLCYFFRMRRPEDNEQKQLFVEQHKHYLDEIIEQISEFSKRVILADANLDKVLSAYNKHRDKPIREQAENIIHLFTLTNLGAPAAFKYFDTTIDRKRYTSTKEVLDATLIHQSITGLYETRIDLSQLGGD

SEQ ID NO: 277 - protein, 1551 aa, synthetic construct
  REGION 1..1551: note = 110.5 Cas9 TadAins delta59-66 1250 polypeptide sequence
MDKKYSIGLAIGTNSVGWAVITDEYKVPSKKFKVLGNTDRHSIKKNLIGALLFDSGETAEATRLKRTARRRYTRRKNRICYLQEIFSNEMAKVDDSFFHRLEESFLVEEDKKHERHPIFGNIVDEVAYHEKYPTIYHLRKKLVDSTDKADLRLIYLALAHMIKFRGHFLIEGDLNPDNSDVDKLFIQLVQTYNQLFEENPINASGVDAKAILSARLSKSRRLENLIAQLPGEKKNGLFGNLIALSLGLTPNFKSNFDLAEDAKLQLSKDTYDDDLDNLLAQIGDQYADLFLAAKNLSDAILLSDILRVNTEITKAPLSASMIKRYDEHHQDLTLLKALVRQQLPEKYKEIFFDQSKNGYAGYIDGGASQEEFYKFIKPILEKMDGTEELLVKLNREDLLRKQRTFDNGSIPHQIHLGELHAILRRQEDFYPFLKDNREKIEKILTFRIPYYVGPLARGNSRFAWMTRKSEETITPWNFEEVVDKGASAQSFIERMTNFDKNLPNEKVLPKHSLLYEYFTVYNELTKVKYVTEGMRKPAFLSGEQKKAIVDLLFKTNRKVTVKQLKEDYFKKIECFDSVEISGVEDRFNASLGTYHDLLKIIKDKDFLDNEENEDILEDIVLTLTLFEDREMIEERLKTYAHLFDDKVMKQLKRRRYTGWGRLSRKLINGIRDKQSGKTILDFLKSDGFANRNFMQLIHDDSLTFKEDIQKAQVSGQGDSLHEHIANLAGSPAIKKGILQTVKVVDELVKVMGRHKPENIVIEMARENQTTQKGQKNSRERMKRIEEGIKELGSQILKEHPVENTQLQNEKLYLYYLQNGRDMYVDQELDINRLSDYDVDHIVPQSFLKDDSIDNKVLTRSDKNRGKSDNVPSEEVVKKMKNYWRQLLNAKLITQRKFDNLTKAERGGLSELDKAGFIKRQLVETRQITKHVAQILDSRMNTKYDENDKLIREVKVITLKSKLVSDFRKDFQFYKVREINNYHHAHDAYLNAVVGTALIKKYPKLESEFVYGDYKVYDVRKMIAKSEQEIGKATAKYFFYSNIMNFFKTEITLANGEIRKRPLIETNGETGEIVWDKGRDFATVRKVLSMPQVNIVKKTEVQTGGFSKESILPKRNSDKLIARKKDWDPKKYGGFDSPTVAYSVLVVAKVEKGKSKKLKSVKELLGITIMERSSFEKNPIDFLEAKGYKEVKKDLIIKLPKYSLFELENGRKRMLASAGELQKGNELALPSKYVNFLYLASHYEKLKGSPGSSGSSGSETPGTSESATPESGSSGSEVEFSHEYWMRHALTLAKRARDEREVPVGAVLVLNNRVIGEGWNRAHAEIMALRQGGLVMQNYRLIDATLYVTFEPCVMCAGAMIHSRIGRVVFGVRNAKTGAAGSLMDVLHYPGMNHRVEITEGILADECAALLCYFFRMPRQVFNAQKKAQSSTDEDNEQKQLFVEQHKHYLDEIIEQISEFSKRVILADANLDKVLSAYNKHRDKPIREQAENIIHLFTLTNLGAPAAFKYFDTTIDRKRYTSTKEVLDATLIHQSITGLYETRIDLSQLGGD

SEQ ID NO: 278 - protein, 1546 aa, synthetic construct
  REGION 1..1546: note = 110.6 Cas9 TadAins 1251 polypeptide sequence
MDKKYSIGLAIGTNSVGWAVITDEYKVPSKKFKVLGNTDRHSIKKNLIGALLFDSGETAEATRLKRTARRRYTRRKNRICYLQEIFSNEMAKVDDSFFHRLEESFLVEEDKKHERHPIFGNIVDEVAYHEKYPTIYHLRKKLVDSTDKADLRLIYLALAHMIKFRGHFLIEGDLNPDNSDVDKLFIQLVQTYNQLFEENPINASGVDAKAILSARLSKSRRLENLIAQLPGEKKNGLFGNLIALSLGLTPNFKSNFDLAEDAKLQLSKDTYDDDLDNLLAQIGDQYADLFLAAKNLSDAILLSDILRVNTEITKAPLSASMIKRYDEHHQDLTLLKALVRQQLPEKYKEIFFDQSKNGYAGYIDGGASQEEFYKFIKPILEKMDGTEELLVKLNREDLLRKQRTFDNGSIPHQIHLGELHAILRRQEDFYPFLKDNREKIEKILTFRIPYYVGPLARGNSRFAWMTRKSEETITPWNFEEVVDKGASAQSFIERMTNFDKNLPNEKVLPKHSLLYEYFTVYNELTKVKYVTEGMRKPAFLSGEQKKAIVDLLFKTNRKVTVKQLKEDYFKKIECFDSVEISGVEDRFNASLGTYHDLLKIIKDKDFLDNEENEDILEDIVLTLTLFEDREMIEERLKTYAHLFDDKVMKQLKRRRYTGWGRLSRKLINGIRDKQSGKTILDFLKSDGFANRNFMQLIHDDSLTFKEDIQKAQVSGQGDSLHEHIANLAGSPAIKKGILQTVKVVDELVKVMGRHKPENIVIEMARENQTTQKGQKNSRERMKRIEEGIKELGSQILKEHPVENTQLQNEKLYLYYLQNGRDMYVDQELDINRLSDYDVDHIVPQSFLKDDSIDNKVLTRSDKNRGKSDNVPSEEVVKKMKNYWRQLLNAKLITQRKFDNLTKAERGGLSELDKAGFIKRQLVETRQITKHVAQILDSRMNTKYDENDKLIREVKVITLKSKLVSDFRKDFQFYKVREINNYHHAHDAYLNAVVGTALIKKYPKLESEFVYGDYKVYDVRKMIAKSEQEIGKATAKYFFYSNIMNFFKTEITLANGEIRKRPLIETNGETGEIVWDKGRDFATVRKVLSMPQVNIVKKTEVQTGGFSKESILPKRNSDKLIARKKDWDPKKYGGFDSPTVAYSVLVVAKVEKGKSKKLKSVKELLGITIMERSSFEKNPIDFLEAKGYKEVKKDLIIKLPKYSLFELENGRKRMLASAGELQKGNELALPSKYVNFLYLASHYEKLKGSPEGSSGSSGSETPGTSESATPESGSSSGSEVEFSHEYWMRHALTLAKRARDEREVPVGAVLVLNNRVIGEGWNRAIGLHDPTAHAEIMALRQGGLVMQNYRLIDATLYVTFEPCVMCAGAMIHSRIGRVVFGVRNAKTGAAGSLMDVLHYPGMNHRVEITEGILADECAALLCYFFRMRRDNEQKQLFVEQHKHYLDEIIEQISEFSKRVILADANLDKVLSAYNKHRDKPIREQAENIIHLFTLTNLGAPAAFKYFDTTIDRKRYTSTKEVLDATLIHQSITGLYETRIDLSQLGGD

SEQ ID NO: 279 - protein, 1546 aa, synthetic construct
  REGION 1..1546: note = 110.7 Cas9 TadAins 1252 polypeptide sequence
MDKKYSIGLAIGTNSVGWAVITDEYKVPSKKFKVLGNTDRHSIKKNLIGALLFDSGETAEATRLKRTARRRYTRRKNRICYLQEIFSNEMAKVDDSFFHRLEESFLVEEDKKHERHPIFGNIVDEVAYHEKYPTIYHLRKKLVDSTDKADLRLIYLALAHMIKFRGHFLIEGDLNPDNSDVDKLFIQLVQTYNQLFEENPINASGVDAKAILSARLSKSRRLENLIAQLPGEKKNGLFGNLIALSLGLTPNFKSNFDLAEDAKLQLSKDTYDDDLDNLLAQIGDQYADLFLAAKNLSDAILLSDILRVNTEITKAPLSASMIKRYDEHHQDLTLLKALVRQQLPEKYKEIFFDQSKNGYAGYIDGGASQEEFYKFIKPILEKMDGTEELLVKLNREDLLRKQRTFDNGSIPHQIHLGELHAILRRQEDFYPFLKDNREKIEKILTFRIPYYVGPLARGNSRFAWMTRKSEETITPWNFEEVVDKGASAQSFIERMTNFDKNLPNEKVLPKHSLLYEYFTVYNELTKVKYVTEGMRKPAFLSGEQKKAIVDLLFKTNRKVTVKQLKEDYFKKIECFDSVEISGVEDRFNASLGTYHDLLKIIKDKDFLDNEENEDILEDIVLTLTLFEDREMIEERLKTYAHLFDDKVMKQLKRRRYTGWGRLSRKLINGIRDKQSGKTILDFLKSDGFANRNFMQLIHDDSLTFKEDIQKAQVSGQGDSLHEHIANLAGSPAIKKGILQTVKVVDELVKVMGRHKPENIVIEMARENQTTQKGQKNSRERMKRIEEGIKELGSQILKEHPVENTQLQNEKLYLYYLQNGRDMYVDQELDINRLSDYDVDHIVPQSFLKDDSIDNKVLTRSDKNRGKSDNVPSEEVVKKMKNYWRQLLNAKLITQRKFDNLTKAERGGLSELDKAGFIKRQLVETRQITKHVAQILDSRMNTKYDENDKLIREVKVITLKSKLVSDFRKDFQFYKVREINNYHHAHDAYLNAVVGTALIKKYPKLESEFVYGDYKVYDVRKMIAKSEQEIGKATAKYFFYSNIMNFFKTEITLANGEIRKRPLIETNGETGEIVWDKGRDFATVRKVLSMPQVNIVKKTEVQTGGFSKESILPKRNSDKLIARKKDWDPKKYGGFDSPTVAYSVLVVAKVEKGKSKKLKSVKELLGITIMERSSFEKNPIDFLEAKGYKEVKKDLIIKLPKYSLFELENGRKRMLASAGELQKGNELALPSKYVNFLYLASHYEKLKGSPEDGSSGSSGSETPGTSESATPESGSSSGSEVEFSHEYWMRHALTLAKRARDEREVPVGAVLVLNNRVIGEGWNRAIGLHDPTAHAEIMALRQGGLVMQNYRLIDATLYVTFEPCVMCAGAMIHSRIGRVVFGVRNAKTGAAGSLMDVLHYPGMNHRVEITEGILADECAALLCYFFRMRRNEQKQLFVEQHKHYLDEIIEQISEFSKRVILADANLDKVLSAYNKHRDKPIREQAENIIHLFTLTNLGAPAAFKYFDTTIDRKRYTSTKEVLDATLIHQSITGLYETRIDLSQLGGD

SEQ ID NO: 280 - protein, 1533 aa, synthetic construct
  REGION 1..1533: note = 110.8 Cas9 TadAins delta59-66 C-truncate 1250 polypeptide sequence
MDKKYSIGLAIGTNSVGWAVITDEYKVPSKKFKVLGNTDRHSIKKNLIGALLFDSGETAEATRLKRTARRRYTRRKNRICYLQEIFSNEMAKVDDSFFHRLEESFLVEEDKKHERHPIFGNIVDEVAYHEKYPTIYHLRKKLVDSTDKADLRLIYLALAHMIKFRGHFLIEGDLNPDNSDVDKLFIQLVQTYNQLFEENPINASGVDAKAILSARLSKSRRLENLIAQLPGEKKNGLFGNLIALSLGLTPNFKSNFDLAEDAKLQLSKDTYDDDLDNLLAQIGDQYADLFLAAKNLSDAILLSDILRVNTEITKAPLSASMIKRYDEHHQDLTLLKALVRQQLPEKYKEIFFDQSKNGYAGYIDGGASQEEFYKFIKPILEKMDGTEELLVKLNREDLLRKQRTFDNGSIPHQIHLGELHAILRRQEDFYPFLKDNREKIEKILTFRIPYYVGPLARGNSRFAWMTRKSEETITPWNFEEVVDKGASAQSFIERMTNFDKNLPNEKVLPKHSLLYEYFTVYNELTKVKYVTEGMRKPAFLSGEQKKAIVDLLFKTNRKVTVKQLKEDYFKKIECFDSVEISGVEDRFNASLGTYHDLLKIIKDKDFLDNEENEDILEDIVLTLTLFEDREMIEERLKTYAHLFDDKVMKQLKRRRYTGWGRLSRKLINGIRDKQSGKTILDFLKSDGFANRNFMQLIHDDSLTFKEDIQKAQVSGQGDSLHEHIANLAGSPAIKKGILQTVKVVDELVKVMGRHKPENIVIEMARENQTTQKGQKNSRERMKRIEEGIKELGSQILKEHPVENTQLQNEKLYLYYLQNGRDMYVDQELDINRLSDYDVDHIVPQSFLKDDSIDNKVLTRSDKNRGKSDNVPSEEVVKKMKNYWRQLLNAKLITQRKFDNLTKAERGGLSELDKAGFIKRQLVETRQITKHVAQILDSRMNTKYDENDKLIREVKVITLKSKLVSDFRKDFQFYKVREINNYHHAHDAYLNAVVGTALIKKYPKLESEFVYGDYKVYDVRKMIAKSEQEIGKATAKYFFYSNIMNFFKTEITLANGEIRKRPLIETNGETGEIVWDKGRDFATVRKVLSMPQVNIVKKTEVQTGGFSKESILPKRNSDKLIARKKDWDPKKYGGFDSPTVAYSVLVVAKVEKGKSKKLKSVKELLGITIMERSSFEKNPIDFLEAKGYKEVKKDLIIKLPKYSLFELENGRKRMLASAGELQKGNELALPSKYVNFLYLASHYEKLKGSPGSSGSETPGTSESATPESSGSEVEFSHEYWMRHALTLAKRARDEREVPVGAVLVLNNRVIGEGWNRAHAEIMALRQGGLVMQNYRLIDATLYVTFEPCVMCAGAMIHSRIGRVVFGVRNAKTGAAGSLMDVLHYPGMNHRVEITEGILADECAALLCYFFRMPRQEDNEQKQLFVEQHKHYLDEIIEQISEFSKRVILADANLDKVLSAYNKHRDKPIREQAENIIHLFTLTNLGAPAAFKYFDTTIDRKRYTSTKEVLDATLIHQSITGLYETRIDLSQLGGD

SEQ ID NO: 281 - protein, 1549 aa, synthetic construct
  REGION 1..1549: note = 111.1 Cas9 TadAins 997 polypeptide sequence
MDKKYSIGLAIGTNSVGWAVITDEYKVPSKKFKVLGNTDRHSIKKNLIGALLFDSGETAEATRLKRTARRRYTRRKNRICYLQEIFSNEMAKVDDSFFHRLEESFLVEEDKKHERHPIFGNIVDEVAYHEKYPTIYHLRKKLVDSTDKADLRLIYLALAHMIKFRGHFLIEGDLNPDNSDVDKLFIQLVQTYNQLFEENPINASGVDAKAILSARLSKSRRLENLIAQLPGEKKNGLFGNLIALSLGLTPNFKSNFDLAEDAKLQLSKDTYDDDLDNLLAQIGDQYADLFLAAKNLSDAILLSDILRVNTEITKAPLSASMIKRYDEHHQDLTLLKALVRQQLPEKYKEIFFDQSKNGYAGYIDGGASQEEFYKFIKPILEKMDGTEELLVKLNREDLLRKQRTFDNGSIPHQIHLGELHAILRRQEDFYPFLKDNREKIEKILTFRIPYYVGPLARGNSRFAWMTRKSEETITPWNFEEVVDKGASAQSFIERMTNFDKNLPNEKVLPKHSLLYEYFTVYNELTKVKYVTEGMRKPAFLSGEQKKAIVDLLFKTNRKVTVKQLKEDYFKKIECFDSVEISGVEDRFNASLGTYHDLLKIIKDKDFLDNEENEDILEDIVLTLTLFEDREMIEERLKTYAHLFDDKVMKQLKRRRYTGWGRLSRKLINGIRDKQSGKTILDFLKSDGFANRNFMQLIHDDSLTFKEDIQKAQVSGQGDSLHEHIANLAGSPAIKKGILQTVKVVDELVKVMGRHKPENIVIEMARENQTTQKGQKNSRERMKRIEEGIKELGSQILKEHPVENTQLQNEKLYLYYLQNGRDMYVDQELDINRLSDYDVDHIVPQSFLKDDSIDNKVLTRSDKNRGKSDNVPSEEVVKKMKNYWRQLLNAKLITQRKFDNLTKAERGGLSELDKAGFIKRQLVETRQITKHVAQILDSRMNTKYDENDKLIREVKVITLKSKLVSDFRKDFQFYKVREINNYHHAHDAYLNAVVGTALSHEYWMRHALTLAKRARDEREVPVGAVLVLNNRVIGEGWNRAIGLHDPTAHAEIMALRQGGLVMQNYRLIDATLYVTFEPCVMCAGAMIHSRIGRVVFGVRNAKTGAAGSLMDVLHYPGMNHRVEITEGILADECAALLCYFFRMPRQVFNAQKKAQSSTDGSSGSETPGTSESATPESSGIKKYPKLESEFVYGDYKVYDVRKMIAKSEQEIGKATAKYFFYSNIMNFFKTEITLANGEIRKRPLIETNGETGEIVWDKGRDFATVRKVLSMPQVNIVKKTEVQTGGFSKESILPKRNSDKLIARKKDWDPKKYGGFDSPTVAYSVLVVAKVEKGKSKKLKSVKELLGITIMERSSFEKNPIDFLEAKGYKEVKKDLIIKLPKYSLFELENGRKRMLASAGELQKGNELALPSKYVNFLYLASHYEKLKGSPEDNEQKQLFVEQHKHYLDEIIEQISEFSKRVILADANLDKVLSAYNKHRDKPIREQAENIIHLFTLTNLGAPAAFKYFDTTIDRKRYTSTKEVLDATLIHQSITGLYETRIDLSQLGGD

SEQ ID NO: 282 - protein, 1555 aa, synthetic construct
  REGION 1..1555: note = 111.2 Cas9 TadAins 997 polypeptide sequence
MDKKYSIGLAIGTNSVGWAVITDEYKVPSKKFKVLGNTDRHSIKKNLIGALLFDSGETAEATRLKRTARRRYTRRKNRICYLQEIFSNEMAKVDDSFFHRLEESFLVEEDKKHERHPIFGNIVDEVAYHEKYPTIYHLRKKLVDSTDKADLRLIYLALAHMIKFRGHFLIEGDLNPDNSDVDKLFIQLVQTYNQLFEENPINASGVDAKAILSARLSKSRRLENLIAQLPGEKKNGLFGNLIALSLGLTPNFKSNFDLAEDAKLQLSKDTYDDDLDNLLAQIGDQYADLFLAAKNLSDAILLSDILRVNTEITKAPLSASMIKRYDEHHQDLTLLKALVRQQLPEKYKEIFFDQSKNGYAGYIDGGASQEEFYKFIKPILEKMDGTEELLVKLNREDLLRKQRTFDNGSIPHQIHLGELHAILRRQEDFYPFLKDNREKIEKILTFRIPYYVGPLARGNSRFAWMTRKSEETITPWNFEEVVDKGASAQSFIERMTNFDKNLPNEKVLPKHSLLYEYFTVYNELTKVKYVTEGMRKPAFLSGEQKKAIVDLLFKTNRKVTVKQLKEDYFKKIECFDSVEISGVEDRFNASLGTYHDLLKIIKDKDFLDNEENEDILEDIVLTLTLFEDREMIEERLKTYAHLFDDKVMKQLKRRRYTGWGRLSRKLINGIRDKQSGKTILDFLKSDGFANRNFMQLIHDDSLTFKEDIQKAQVSGQGDSLHEHIANLAGSPAIKKGILQTVKVVDELVKVMGRHKPENIVIEMARENQTTQKGQKNSRERMKRIEEGIKELGSQILKEHPVENTQLQNEKLYLYYLQNGRDMYVDQELDINRLSDYDVDHIVPQSFLKDDSIDNKVLTRSDKNRGKSDNVPSEEVVKKMKNYWRQLLNAKLITQRKFDNLTKAERGGLSELDKAGFIKRQLVETRQITKHVAQILDSRMNTKYDENDKLIREVKVITLKSKLVSDFRKDFQFYKVREINNYHHAHDAYLNAVVGTALSHEYWMRHALTLAKRARDEREVPVGAVLVLNNRVIGEGWNRAIGLHDPTAHAEIMALRQGGLVMQNYRLIDATLYVTFEPCVMCAGAMIHSRIGRVVFGVRNAKTGAAGSLMDVLHYPGMNHRVEITEGILADECAALLCYFFRMPRQVFNAQKKAQSSTDGSSGSSGSETPGTSESATPESSGGSSIKKYPKLESEFVYGDYKVYDVRKMIAKSEQEIGKATAKYFFYSNIMNFFKTEITLANGEIRKRPLIETNGETGEIVWDKGRDFATVRKVLSMPQVNIVKKTEVQTGGFSKESILPKRNSDKLIARKKDWDPKKYGGFDSPTVAYSVLVVAKVEKGKSKKLKSVKELLGITIMERSSFEKNPIDFLEAKGYKEVKKDLIIKLPKYSLFELENGRKRMLASAGELQKGNELALPSKYVNFLYLASHYEKLKGSPEDNEQKQLFVEQHKHYLDEIIEQISEFSKRVILADANLDKVLSAYNKHRDKPIREQAENIIHLFTLTNLGAPAAFKYFDTTIDRKRYTSTKEVLDATLIHQSITGLYETRIDLSQLGGD

SEQ ID NO: 283 - protein, 1421 aa, synthetic construct
  REGION 1..1421: note = 112 delta HNH TadA polypeptide sequence
MDKKYSIGLAIGTNSVGWAVITDEYKVPSKKFKVLGNTDRHSIKKNLIGALLFDSGETAEATRLKRTARRRYTRRKNRICYLQEIFSNEMAKVDDSFFHRLEESFLVEEDKKHERHPIFGNIVDEVAYHEKYPTIYHLRKKLVDSTDKADLRLIYLALAHMIKFRGHFLIEGDLNPDNSDVDKLFIQLVQTYNQLFEENPINASGVDAKAILSARLSKSRRLENLIAQLPGEKKNGLFGNLIALSLGLTPNFKSNFDLAEDAKLQLSKDTYDDDLDNLLAQIGDQYADLFLAAKNLSDAILLSDILRVNTEITKAPLSASMIKRYDEHHQDLTLLKALVRQQLPEKYKEIFFDQSKNGYAGYIDGGASQEEFYKFIKPILEKMDGTEELLVKLNREDLLRKQRTFDNGSIPHQIHLGELHAILRRQEDFYPFLKDNREKIEKILTFRIPYYVGPLARGNSRFAWMTRKSEETITPWNFEEVVDKGASAQSFIERMTNFDKNLPNEKVLPKHSLLYEYFTVYNELTKVKYVTEGMRKPAFLSGEQKKAIVDLLFKTNRKVTVKQLKEDYFKKIECFDSVEISGVEDRFNASLGTYHDLLKIIKDKDFLDNEENEDILEDIVLTLTLFEDREMIEERLKTYAHLFDDKVMKQLKRRRYTGWGRLSRKLINGIRDKQSGKTILDFLKSDGFANRNFMQLIHDDSLTFKEDIQKAQVSGQGDSLHEHIANLAGSPAIKKGILQTVKVVDELVKVMGRHKPENIVIEMARENQTTQKGQKNSRERMKRIEEGIKELGSEVEFSHEYWMRHALTLAKRARDEREVPVGAVLVLNNRVIGEGWNRAIGLHDPTAHAEIMALRQGGLVMQNYRLIDATLYVTFEPCVMCAGAMIHSRIGRVVFGVRNAKTGAAGSLMDVLHYPGMNHRVEITEGILADECAALLCYFFRMPRQVFNAQKKAQSSTDGGLSELDKAGFIKRQLVETRQITKHVAQILDSRMNTKYDENDKLIREVKVITLKSKLVSDFRKDFQFYKVREINNYHHAHDAYLNAVVGTALIKKYPKLESEFVYGDYKVYDVRKMIAKSEQEIGKATAKYFFYSNIMNFFKTEITLANGEIRKRPLIETNGETGEIVWDKGRDFATVRKVLSMPQVNIVKKTEVQTGGFSKESILPKRNSDKLIARKKDWDPKKYGGFDSPTVAYSVLVVAKVEKGKSKKLKSVKELLGITIMERSSFEKNPIDFLEAKGYKEVKKDLIIKLPKYSLFELENGRKRMLASAGELQKGNELALPSKYVNFLYLASHYEKLKGSPEDNEQKQLFVEQHKHYLDEIIEQISEFSKRVILADANLDKVLSAYNKHRDKPIREQAENIIHLFTLTNLGAPAAFKYFDTTIDRKRYTSTKEVLDATLIHQSITGLYETRIDLSQLGGD

SEQ ID NO: 284 - protein, 1552 aa, synthetic construct
  REGION 1..1552: note = 113 N-term single TadA helixtrunc 165-end polypeptide sequence
MSEVEFSHEYWMRHALTLAKRARDEREVPVGAVLVLNNRVIGEGWNRAIGLHDPTAHAEIMALRQGGLVMQNYRLIDATLYVTFEPCVMCAGAMIHSRIGRVVFGVRNAKTGAAGSLMDVLHYPGMNHRVEITEGILADECAALLCYFFRMPRSGGSSGGSSGSETPGTSESATPESSGGSSGGSDKKYSIGLAIGTNSVGWAVITDEYKVPSKKFKVLGNTDRHSIKKNLIGALLFDSGETAEATRLKRTARRRYTRRKNRICYLQEIFSNEMAKVDDSFFHRLEESFLVEEDKKHERHPIFGNIVDEVAYHEKYPTIYHLRKKLVDSTDKADLRLIYLALAHMIKFRGHFLIEGDLNPDNSDVDKLFIQLVQTYNQLFEENPINASGVDAKAILSARLSKSRRLENLIAQLPGEKKNGLFGNLIALSLGLTPNFKSNFDLAEDAKLQLSKDTYDDDLDNLLAQIGDQYADLFLAAKNLSDAILLSDILRVNTEITKAPLSASMIKRYDEHHQDLTLLKALVRQQLPEKYKEIFFDQSKNGYAGYIDGGASQEEFYKFIKPILEKMDGTEELLVKLNREDLLRKQRTFDNGSIPHQIHLGELHAILRRQEDFYPFLKDNREKIEKILTFRIPYYVGPLARGNSRFAWMTRKSEETITPWNFEEVVDKGASAQSFIERMTNFDKNLPNEKVLPKHSLLYEYFTVYNELTKVKYVTEGMRKPAFLSGEQKKAIVDLLFKTNRKVTVKQLKEDYFKKIECFDSVEISGVEDRFNASLGTYHDLLKIIKDKDFLDNEENEDILEDIVLTLTLFEDREMIEERLKTYAHLFDDKVMKQLKRRRYTGWGRLSRKLINGIRDKQSGKTILDFLKSDGFANRNFMQLIHDDSLTFKEDIQKAQVSGQGDSLHEHIANLAGSPAIKKGILQTVKVVDELVKVMGRHKPENIVIEMARENQTTQKGQKNSRERMKRIEEGIKELGSQILKEHPVENTQLQNEKLYLYYLQNGRDMYVDQELDINRLSDYDVDHIVPQSFLKDDSIDNKVLTRSDKNRGKSDNVPSEEVVKKMKNYWRQLLNAKLITQRKFDNLTKAERGGLSELDKAGFIKRQLVETRQITKHVAQILDSRMNTKYDENDKLIREVKVITLKSKLVSDFRKDFQFYKVREINNYHHAHDAYLNAVVGTALIKKYPKLESEFVYGDYKVYDVRKMIAKSEQEIGKATAKYFFYSNIMNFFKTEITLANGEIRKRPLIETNGETGEIVWDKGRDFATVRKVLSMPQVNIVKKTEVQTGGFSKESILPKRNSDKLIARKKDWDPKKYGGFDSPTVAYSVLVVAKVEKGKSKKLKSVKELLGITIMERSSFEKNPIDFLEAKGYKEVKKDLIIKLPKYSLFELENGRKRMLASAGELQKGNELALPSKYVNFLYLASHYEKLKGSPEDNEQKQLFVEQHKHYLDEIIEQISEFSKRVILADANLDKVLSAYNKHRDKPIREQAENIIHLFTLTNLGAPAAFKYFDTTIDRKRYTSTKEVLDATLIHQSITGLYETRIDLSQLGGD

SEQ ID NO: 285 - protein, 1545 aa, synthetic construct
  REGION 1..1545: note = 114 N-term single TadA helixtrunc 165-end delta 59-65 polypeptide sequence
MSEVEFSHEYWMRHALTLAKRARDEREVPVGAVLVLNNRVIGEGWNRTAHAEIMALRQGGLVMQNYRLIDATLYVTFEPCVMCAGAMIHSRIGRVVFGVRNAKTGAAGSLMDVLHYPGMNHRVEITEGILADECAALLCYFFRMPRSGGSSGGSSGSETPGTSESATPESSGGSSGGSDKKYSIGLAIGTNSVGWAVITDEYKVPSKKFKVLGNTDRHSIKKNLIGALLFDSGETAEATRLKRTARRRYTRRKNRICYLQEIFSNEMAKVDDSFFHRLEESFLVEEDKKHERHPIFGNIVDEVAYHEKYPTIYHLRKKLVDSTDKADLRLIYLALAHMIKFRGHFLIEGDLNPDNSDVDKLFIQLVQTYNQLFEENPINASGVDAKAILSARLSKSRRLENLIAQLPGEKKNGLFGNLIALSLGLTPNFKSNFDLAEDAKLQLSKDTYDDDLDNLLAQIGDQYADLFLAAKNLSDAILLSDILRVNTEITKAPLSASMIKRYDEHHQDLTLLKALVRQQLPEKYKEIFFDQSKNGYAGYIDGGASQEEFYKFIKPILEKMDGTEELLVKLNREDLLRKQRTFDNGSIPHQIHLGELHAILRRQEDFYPFLKDNREKIEKILTFRIPYYVGPLARGNSRFAWMTRKSEETITPWNFEEVVDKGASAQSFIERMTNFDKNLPNEKVLPKHSLLYEYFTVYNELTKVKYVTEGMRKPAFLSGEQKKAIVDLLFKTNRKVTVKQLKEDYFKKIECFDSVEISGVEDRFNASLGTYHDLLKIIKDKDFLDNEENEDILEDIVLTLTLFEDREMIEERLKTYAHLFDDKVMKQLKRRRYTGWGRLSRKLINGIRDKQSGKTILDFLKSDGFANRNFMQLIHDDSLTFKEDIQKAQVSGQGDSLHEHIANLAGSPAIKKGILQTVKVVDELVKVMGRHKPENIVIEMARENQTTQKGQKNSRERMKRIEEGIKELGSQILKEHPVENTQLQNEKLYLYYLQNGRDMYVDQELDINRLSDYDVDHIVPQSFLKDDSIDNKVLTRSDKNRGKSDNVPSEEVVKKMKNYWRQLLNAKLITQRKFDNLTKAERGGLSELDKAGFIKRQLVETRQITKHVAQILDSRMNTKYDENDKLIREVKVITLKSKLVSDFRKDFQFYKVREINNYHHAHDAYLNAVVGTALIKKYPKLESEFVYGDYKVYDVRKMIAKSEQEIGKATAKYFFYSNIMNFFKTEITLANGEIRKRPLIETNGETGEIVWDKGRDFATVRKVLSMPQVNIVKKTEVQTGGFSKESILPKRNSDKLIARKKDWDPKKYGGFDSPTVAYSVLVVAKVEKGKSKKLKSVKELLGITIMERSSFEKNPIDFLEAKGYKEVKKDLIIKLPKYSLFELENGRKRMLASAGELQKGNELALPSKYVNFLYLASHYEKLKGSPEDNEQKQLFVEQHKHYLDEIIEQISEFSKRVILADANLDKVLSAYNKHRDKPIREQAENIIHLFTLTNLGAPAAFKYFDTTIDRKRYTSTKEVLDATLIHQSITGLYETRIDLSQLGGD

SEQ ID NO: 286 - protein, 1541 aa, synthetic construct
  REGION 1..1541: note = 115.1 Cas9 TadAins 1004 polypeptide sequence
MDKKYSIGLAIGTNSVGWAVITDEYKVPSKKFKVLGNTDRHSIKKNLIGALLFDSGETAEATRLKRTARRRYTRRKNRICYLQEIFSNEMAKVDDSFFHRLEESFLVEEDKKHERHPIFGNIVDEVAYHEKYPTIYHLRKKLVDSTDKADLRLIYLALAHMIKFRGHFLIEGDLNPDNSDVDKLFIQLVQTYNQLFEENPINASGVDAKAILSARLSKSRRLENLIAQLPGEKKNGLFGNLIALSLGLTPNFKSNFDLAEDAKLQLSKDTYDDDLDNLLAQIGDQYADLFLAAKNLSDAILLSDILRVNTEITKAPLSASMIKRYDEHHQDLTLLKALVRQQLPEKYKEIFFDQSKNGYAGYIDGGASQEEFYKFIKPILEKMDGTEELLVKLNREDLLRKQRTFDNGSIPHQIHLGELHAILRRQEDFYPFLKDNREKIEKILTFRIPYYVGPLARGNSRFAWMTRKSEETITPWNFEEVVDKGASAQSFIERMTNFDKNLPNEKVLPKHSLLYEYFTVYNELTKVKYVTEGMRKPAFLSGEQKKAIVDLLFKTNRKVTVKQLKEDYFKKIECFDSVEISGVEDRFNASLGTYHDLLKIIKDKDFLDNEENEDILEDIVLTLTLFEDREMIEERLKTYAHLFDDKVMKQLKRRRYTGWGRLSRKLINGIRDKQSGKTILDFLKSDGFANRNFMQLIHDDSLTFKEDIQKAQVSGQGDSLHEHIANLAGSPAIKKGILQTVKVVDELVKVMGRHKPENIVIEMARENQTTQKGQKNSRERMKRIEEGIKELGSQILKEHPVENTQLQNEKLYLYYLQNGRDMYVDQELDINRLSDYDVDHIVPQSFLKDDSIDNKVLTRSDKNRGKSDNVPSEEVVKKMKNYWRQLLNAKLITQRKFDNLTKAERGGLSELDKAGFIKRQLVETRQITKHVAQILDSRMNTKYDENDKLIREVKVITLKSKLVSDFRKDFQFYKVREINNYHHAHDAYLNAVVGTALIKKYPKGSSGSETPGTSESATPESSGSEVEFSHEYWMRHALTLAKRARDEREVPVGAVLVLNNRVIGEGWNRAIGLHDPTAHAEIMALRQGGLVMQNYRLIDATLYVTFEPCVMCAGAMIHSRIGRVVFGVRNAKTGAAGSLMDVLHYPGMNHRVEITEGILADECAALLCYFFRMPRQLESEFVYGDYKVYDVRKMIAKSEQEIGKATAKYFFYSNIMNFFKTEITLANGEIRKRPLIETNGETGEIVWDKGRDFATVRKVLSMPQVNIVKKTEVQTGGFSKESILPKRNSDKLIARKKDWDPKKYGGFDSPTVAYSVLVVAKVEKGKSKKLKSVKELLGITIMERSSFEKNPIDFLEAKGYKEVKKDLIIKLPKYSLFELENGRKRMLASAGELQKGNELALPSKYVNFLYLASHYEKLKGSPEDNEQKQLFVEQHKHYLDEIIEQISEFSKRVILADANLDKVLSAYNKHRDKPIREQAENIIHLFTLTNLGAPAAFKYFDTTIDRKRYTSTKEVLDATLIHQSITGLYETRIDLSQLGGD

SEQ ID NO: 287 - protein, 1541 aa, synthetic construct
  REGION 1..1541: note = 115.2 Cas9 TadAins 1005 polypeptide sequence
MDKKYSIGLAIGTNSVGWAVITDEYKVPSKKFKVLGNTDRHSIKKNLIGALLFDSGETAEATRLKRTARRRYTRRKNRICYLQEIFSNEMAKVDDSFFHRLEESFLVEEDKKHERHPIFGNIVDEVAYHEKYPTIYHLRKKLVDSTDKADLRLIYLALAHMIKFRGHFLIEGDLNPDNSDVDKLFIQLVQTYNQLFEENPINASGVDAKAILSARLSKSRRLENLIAQLPGEKKNGLFGNLIALSLGLTPNFKSNFDLAEDAKLQLSKDTYDDDLDNLLAQIGDQYADLFLAAKNLSDAILLSDILRVNTEITKAPLSASMIKRYDEHHQDLTLLKALVRQQLPEKYKEIFFDQSKNGYAGYIDGGASQEEFYKFIKPILEKMDGTEELLVKLNREDLLRKQRTFDNGSIPHQIHLGELHAILRRQEDFYPFLKDNREKIEKILTFRIPYYVGPLARGNSRFAWMTRKSEETITPWNFEEVVDKGASAQSFIERMTNFDKNLPNEKVLPKHSLLYEYFTVYNELTKVKYVTEGMRKPAFLSGEQKKAIVDLLFKTNRKVTVKQLKEDYFKKIECFDSVEISGVEDRFNASLGTYHDLLKIIKDKDFLDNEENEDILEDIVLTLTLFEDREMIEERLKTYAHLFDDKVMKQLKRRRYTGWGRLSRKLINGIRDKQSGKTILDFLKSDGFANRNFMQLIHDDSLTFKEDIQKAQVSGQGDSLHEHIANLAGSPAIKKGILQTVKVVDELVKVMGRHKPENIVIEMARENQTTQKGQKNSRERMKRIEEGIKELGSQILKEHPVENTQLQNEKLYLYYLQNGRDMYVDQELDINRLSDYDVDHIVPQSFLKDDSIDNKVLTRSDKNRGKSDNVPSEEVVKKMKNYWRQLLNAKLITQRKFDNLTKAERGGLSELDKAGFIKRQLVETRQITKHVAQILDSRMNTKYDENDKLIREVKVITLKSKLVSDFRKDFQFYKVREINNYHHAHDAYLNAVVGTALIKKYPKLGSSGSETPGTSESATPESSGSEVEFSHEYWMRHALTLAKRARDEREVPVGAVLVLNNRVIGEGWNRAIGLHDPTAHAEIMALRQGGLVMQNYRLIDATLYVTFEPCVMCAGAMIHSRIGRVVFGVRNAKTGAAGSLMDVLHYPGMNHRVEITEGILADECAALLCYFFRMPRQESEFVYGDYKVYDVRKMIAKSEQEIGKATAKYFFYSNIMNFFKTEITLANGEIRKRPLIETNGETGEIVWDKGRDFATVRKVLSMPQVNIVKKTEVQTGGFSKESILPKRNSDKLIARKKDWDPKKYGGFDSPTVAYSVLVVAKVEKGKSKKLKSVKELLGITIMERSSFEKNPIDFLEAKGYKEVKKDLIIKLPKYSLFELENGRKRMLASAGELQKGNELALPSKYVNFLYLASHYEKLKGSPEDNEQKQLFVEQHKHYLDEIIEQISEFSKRVILADANLDKVLSAYNKHRDKPIREQAENIIHLFTLTNLGAPAAFKYFDTTIDRKRYTSTKEVLDATLIHQSITGLYETRIDLSQLGGD

SEQ ID NO: 288 - protein, 1541 aa, synthetic construct
  REGION 1..1541: note = 115.3 Cas9 TadAins 1006 polypeptide sequence
MDKKYSIGLAIGTNSVGWAVITDEYKVPSKKFKVLGNTDRHSIKKNLIGALLFDSGETAEATRLKRTARRRYTRRKNRICYLQEIFSNEMAKVDDSFFHRLEESFLVEEDKKHERHPIFGNIVDEVAYHEKYPTIYHLRKKLVDSTDKADLRLIYLALAHMIKFRGHFLIEGDLNPDNSDVDKLFIQLVQTYNQLFEENPINASGVDAKAILSARLSKSRRLENLIAQLPGEKKNGLFGNLIALSLGLTPNFKSNFDLAEDAKLQLSKDTYDDDLDNLLAQIGDQYADLFLAAKNLSDAILLSDILRVNTEITKAPLSASMIKRYDEHHQDLTLLKALVRQQLPEKYKEIFFDQSKNGYAGYIDGGASQEEFYKFIKPILEKMDGTEELLVKLNREDLLRKQRTFDNGSIPHQIHLGELHAILRRQEDFYPFLKDNREKIEKILTFRIPYYVGPLARGNSRFAWMTRKSEETITPWNFEEVVDKGASAQSFIERMTNFDKNLPNEKVLPKHSLLYEYFTVYNELTKVKYVTEGMRKPAFLSGEQKKAIVDLLFKTNRKVTVKQLKEDYFKKIECFDSVEISGVEDRFNASLGTYHDLLKIIKDKDFLDNEENEDILEDIVLTLTLFEDREMIEERLKTYAHLFDDKVMKQLKRRRYTGWGRLSRKLINGIRDKQSGKTILDFLKSDGFANRNFMQLIHDDSLTFKEDIQKAQVSGQGDSLHEHIANLAGSPAIKKGILQTVKVVDELVKVMGRHKPENIVIEMARENQTTQKGQKNSRERMKRIEEGIKELGSQILKEHPVENTQLQNEKLYLYYLQNGRDMYVDQELDINRLSDYDVDHIVPQSFLKDDSIDNKVLTRSDKNRGKSDNVPSEEVVKKMKNYWRQLLNAKLITQRKFDNLTKAERGGLSELDKAGFIKRQLVETRQITKHVAQILDSRMNTKYDENDKLIREVKVITLKSKLVSDFRKDFQFYKVREINNYHHAHDAYLNAVVGTALIKKYPKLEGSSGSETPGTSESATPESSGSEVEFSHEYWMRHALTLAKRARDEREVPVGAVLVLNNRVIGEGWNRAIGLHDPTAHAEIMALRQGGLVMQNYRLIDATLYVTFEPCVMCAGAMIHSRIGRVVFGVRNAKTGAAGSLMDVLHYPGMNHRVEITEGILADECAALLCYFFRMPRQSEFVYGDYKVYDVRKMIAKSEQEIGKATAKYFFYSNIMNFFKTEITLANGEIRKRPLIETNGETGEIVWDKGRDFATVRKVLSMPQVNIVKKTEVQTGGFSKESILPKRNSDKLIARKKDWDPKKYGGFDSPTVAYSVLVVAKVEKGKSKKLKSVKELLGITIMERSSFEKNPIDFLEAKGYKEVKKDLIIKLPKYSLFELENGRKRMLASAGELQKGNELALPSKYVNFLYLASHYEKLKGSPEDNEQKQLFVEQHKHYLDEIIEQISEFSKRVILADANLDKVLSAYNKHRDKPIREQAENIIHLFTLTNLGAPAAFKYFDTTIDRKRYTSTKEVLDATLIHQSITGLYETRIDLSQLGGD

SEQ ID NO: 289 - protein, 1541 aa, synthetic construct
  REGION 1..1541: note = 115.4 Cas9 TadAins 1007 polypeptide sequence
MDKKYSIGLAIGTNSVGWAVITDEYKVPSKKFKVLGNTDRHSIKKNLIGALLFDSGETAEATRLKRTARRRYTRRKNRICYLQEIFSNEMAKVDDSFFHRLEESFLVEEDKKHERHPIFGNIVDEVAYHEKYPTIYHLRKKLVDSTDKADLRLIYLALAHMIKFRGHFLIEGDLNPDNSDVDKLFIQLVQTYNQLFEENPINASGVDAKAILSARLSKSRRLENLIAQLPGEKKNGLFGNLIALSLGLTPNFKSNFDLAEDAKLQLSKDTYDDDLDNLLAQIGDQYADLFLAAKNLSDAILLSDILRVNTEITKAPLSASMIKRYDEHHQDLTLLKALVRQQLPEKYKEIFFDQSKNGYAGYIDGGASQEEFYKFIKPILEKMDGTEELLVKLNREDLLRKQRTFDNGSIPHQIHLGELHAILRRQEDFYPFLKDNREKIEKILTFRIPYYVGPLARGNSRFAWMTRKSEETITPWNFEEVVDKGASAQSFIERMTNFDKNLPNEKVLPKHSLLYEYFTVYNELTKVKYVTEGMRKPAFLSGEQKKAIVDLLFKTNRKVTVKQLKEDYFKKIECFDSVEISGVEDRFNASLGTYHDLLKIIKDKDFLDNEENEDILEDIVLTLTLFEDREMIEERLKTYAHLFDDKVMKQLKRRRYTGWGRLSRKLINGIRDKQSGKTILDFLKSDGFANRNFMQLIHDDSLTFKEDIQKAQVSGQGDSLHEHIANLAGSPAIKKGILQTVKVVDELVKVMGRHKPENIVIEMARENQTTQKGQKNSRERMKRIEEGIKELGSQILKEHPVENTQLQNEKLYLYYLQNGRDMYVDQELDINRLSDYDVDHIVPQSFLKDDSIDNKVLTRSDKNRGKSDNVPSEEVVKKMKNYWRQLLNAKLITQRKFDNLTKAERGGLSELDKAGFIKRQLVETRQITKHVAQILDSRMNTKYDENDKLIREVKVITLKSKLVSDFRKDFQFYKVREINNYHHAHDAYLNAVVGTALIKKYPKLESGSSGSETPGTSESATPESSGSEVEFSHEYWMRHALTLAKRARDEREVPVGAVLVLNNRVIGEGWNRAIGLHDPTAHAEIMALRQGGLVMQNYRLIDATLYVTFEPCVMCAGAMIHSRIGRVVFGVRNAKTGAAGSLMDVLHYPGMNHRVEITEGILADECAALLCYFFRMPRQEFVYGDYKVYDVRKMIAKSEQEIGKATAKYFFYSNIMNFFKTEITLANGEIRKRPLIETNGETGEIVWDKGRDFATVRKVLSMPQVNIVKKTEVQTGGFSKESILPKRNSDKLIARKKDWDPKKYGGFDSPTVAYSVLVVAKVEKGKSKKLKSVKELLGITIMERSSFEKNPIDFLEAKGYKEVKKDLIIKLPKYSLFELENGRKRMLASAGELQKGNELALPSKYVNFLYLASHYEKLKGSPEDNEQKQLFVEQHKHYLDEIIEQISEFSKRVILADANLDKVLSAYNKHRDKPIREQAENIIHLFTLTNLGAPAAFKYFDTTIDRKRYTSTKEVLDATLIHQSITGLYETRIDLSQLGGD

SEQ ID NO: 290 - protein, 1541 aa, synthetic construct
  REGION 1..1541: note = 116.1 Cas9 TadAins C-term truncate 792 polypeptide sequence
MDKKYSIGLAIGTNSVGWAVITDEYKVPSKKFKVLGNTDRHSIKKNLIGALLFDSGETAEATRLKRTARRRYTRRKNRICYLQEIFSNEMAKVDDSFFHRLEESFLVEEDKKHERHPIFGNIVDEVAYHEKYPTIYHLRKKLVDSTDKADLRLIYLALAHMIKFRGHFLIEGDLNPDNSDVDKLFIQLVQTYNQLFEENPINASGVDAKAILSARLSKSRRLENLIAQLPGEKKNGLFGNLIALSLGLTPNFKSNFDLAEDAKLQLSKDTYDDDLDNLLAQIGDQYADLFLAAKNLSDAILLSDILRVNTEITKAPLSASMIKRYDEHHQDLTLLKALVRQQLPEKYKEIFFDQSKNGYAGYIDGGASQEEFYKFIKPILEKMDGTEELLVKLNREDLLRKQRTFDNGSIPHQIHLGELHAILRRQEDFYPFLKDNREKIEKILTFRIPYYVGPLARGNSRFAWMTRKSEETITPWNFEEVVDKGASAQSFIERMTNFDKNLPNEKVLPKHSLLYEYFTVYNELTKVKYVTEGMRKPAFLSGEQKKAIVDLLFKTNRKVTVKQLKEDYFKKIECFDSVEISGVEDRFNASLGTYHDLLKIIKDKDFLDNEENEDILEDIVLTLTLFEDREMIEERLKTYAHLFDDKVMKQLKRRRYTGWGRLSRKLINGIRDKQSGKTILDFLKSDGFANRNFMQLIHDDSLTFKEDIQKAQVSGQGDSLHEHIANLAGSPAIKKGILQTVKVVDELVKVMGRHKPENIVIEMARENQTTQKGQKNSRERMKRIEEGIKELGGSSGSETPGTSESATPESSGSEVEFSHEYWMRHALTLAKRARDEREVPVGAVLVLNNRVIGEGWNRAIGLHDPTAHAEIMALRQGGLVMQNYRLIDATLYVTFEPCVMCAGAMIHSRIGRVVFGVRNAKTGAAGSLMDVLHYPGMNHRVEITEGILADECAALLCYFFRMPRQSQILKEHPVENTQLQNEKLYLYYLQNGRDMYVDQELDINRLSDYDVDHIVPQSFLKDDSIDNKVLTRSDKNRGKSDNVPSEEVVKKMKNYWRQLLNAKLITQRKFDNLTKAERGGLSELDKAGFIKRQLVETRQITKHVAQILDSRMNTKYDENDKLIREVKVITLKSKLVSDFRKDFQFYKVREINNYHHAHDAYLNAVVGTALIKKYPKLESEFVYGDYKVYDVRKMIAKSEQEIGKATAKYFFYSNIMNFFKTEITLANGEIRKRPLIETNGETGEIVWDKGRDFATVRKVLSMPQVNIVKKTEVQTGGFSKESILPKRNSDKLIARKKDWDPKKYGGFDSPTVAYSVLVVAKVEKGKSKKLKSVKELLGITIMERSSFEKNPIDFLEAKGYKEVKKDLIIKLPKYSLFELENGRKRMLASAGELQKGNELALPSKYVNFLYLASHYEKLKGSPEDNEQKQLFVEQHKHYLDEIIEQISEFSKRVILADANLDKVLSAYNKHRDKPIREQAENIIHLFTLTNLGAPAAFKYFDTTIDRKRYTSTKEVLDATLIHQSITGLYETRIDLSQLGGD

SEQ ID NO: 291 - protein, 1541 aa, synthetic construct
  REGION 1..1541: note = 116.2 Cas9 TadAins C-term truncate 791 polypeptide sequence
MDKKYSIGLAIGTNSVGWAVITDEYKVPSKKFKVLGNTDRHSIKKNLIGALLFDSGETAEATRLKRTARRRYTRRKNRICYLQEIFSNEMAKVDDSFFHRLEESFLVEEDKKHERHPIFGNIVDEVAYHEKYPTIYHLRKKLVDSTDKADLRLIYLALAHMIKFRGHFLIEGDLNPDNSDVDKLFIQLVQTYNQLFEENPINASGVDAKAILSARLSKSRRLENLIAQLPGEKKNGLFGNLIALSLGLTPNFKSNFDLAEDAKLQLSKDTYDDDLDNLLAQIGDQYADLFLAAKNLSDAILLSDILRVNTEITKAPLSASMIKRYDEHHQDLTLLKALVRQQLPEKYKEIFFDQSKNGYAGYIDGGASQEEFYKFIKPILEKMDGTEELLVKLNREDLLRKQRTFDNGSIPHQIHLGELHAILRRQEDFYPFLKDNREKIEKILTFRIPYYVGPLARGNSRFAWMTRKSEETITPWNFEEVVDKGASAQSFIERMTNFDKNLPNEKVLPKHSLLYEYFTVYNELTKVKYVTEGMRKPAFLSGEQKKAIVDLLFKTNRKVTVKQLKEDYFKKIECFDSVEISGVEDRFNASLGTYHDLLKIIKDKDFLDNEENEDILEDIVLTLTLFEDREMIEERLKTYAHLFDDKVMKQLKRRRYTGWGRLSRKLINGIRDKQSGKTILDFLKSDGFANRNFMQLIHDDSLTFKEDIQKAQVSGQGDSLHEHIANLAGSPAIKKGILQTVKVVDELVKVMGRHKPENIVIEMARENQTTQKGQKNSRERMKRIEEGIKELGSSGSETPGTSESATPESSGSEVEFSHEYWMRHALTLAKRARDEREVPVGAVLVLNNRVIGEGWNRAIGLHDPTAHAEIMALRQGGLVMQNYRLIDATLYVTFEPCVMCAGAMIHSRIGRVVFGVRNAKTGAAGSLMDVLHYPGMNHRVEITEGILADECAALLCYFFRMPRQGSQILKEHPVENTQLQNEKLYLYYLQNGRDMYVDQELDINRLSDYDVDHIVPQSFLKDDSIDNKVLTRSDKNRGKSDNVPSEEVVKKMKNYWRQLLNAKLITQRKFDNLTKAERGGLSELDKAGFIKRQLVETRQITKHVAQILDSRMNTKYDENDKLIREVKVITLKSKLVSDFRKDFQFYKVREINNYHHAHDAYLNAVVGTALIKKYPKLESEFVYGDYKVYDVRKMIAKSEQEIGKATAKYFFYSNIMNFFKTEITLANGEIRKRPLIETNGETGEIVWDKGRDFATVRKVLSMPQVNIVKKTEVQTGGFSKESILPKRNSDKLIARKKDWDPKKYGGFDSPTVAYSVLVVAKVEKGKSKKLKSVKELLGITIMERSSFEKNPIDFLEAKGYKEVKKDLIIKLPKYSLFELENGRKRMLASAGELQKGNELALPSKYVNFLYLASHYEKLKGSPEDNEQKQLFVEQHKHYLDEIIEQISEFSKRVILADANLDKVLSAYNKHRDKPIREQAENIIHLFTLTNLGAPAAFKYFDTTIDRKRYTSTKEVLDATLIHQSITGLYETRIDLSQLGGD

SEQ ID NO: 292 - protein, 1541 aa, synthetic construct
  REGION 1..1541: note = 116.3 Cas9 TadAins C-term truncate 790 polypeptide sequence
MDKKYSIGLAIGTNSVGWAVITDEYKVPSKKFKVLGNTDRHSIKKNLIGALLFDSGETAEATRLKRTARRRYTRRKNRICYLQEIFSNEMAKVDDSFFHRLEESFLVEEDKKHERHPIFGNIVDEVAYHEKYPTIYHLRKKLVDSTDKADLRLIYLALAHMIKFRGHFLIEGDLNPDNSDVDKLFIQLVQTYNQLFEENPINASGVDAKAILSARLSKSRRLENLIAQLPGEKKNGLFGNLIALSLGLTPNFKSNFDLAEDAKLQLSKDTYDDDLDNLLAQIGDQYADLFLAAKNLSDAILLSDILRVNTEITKAPLSASMIKRYDEHHQDLTLLKALVRQQLPEKYKEIFFDQSKNGYAGYIDGGASQEEFYKFIKPILEKMDGTEELLVKLNREDLLRKQRTFDNGSIPHQIHLGELHAILRRQEDFYPFLKDNREKIEKILTFRIPYYVGPLARGNSRFAWMTRKSEETITPWNFEEVVDKGASAQSFIERMTNFDKNLPNEKVLPKHSLLYEYFTVYNELTKVKYVTEGMRKPAFLSGEQKKAIVDLLFKTNRKVTVKQLKEDYFKKIECFDSVEISGVEDRFNASLGTYHDLLKIIKDKDFLDNEENEDILEDIVLTLTLFEDREMIEERLKTYAHLFDDKVMKQLKRRRYTGWGRLSRKLINGIRDKQSGKTILDFLKSDGFANRNFMQLIHDDSLTFKEDIQKAQVSGQGDSLHEHIANLAGSPAIKKGILQTVKVVDELVKVMGRHKPENIVIEMARENQTTQKGQKNSRERMKRIEEGIKEGSSGSETPGTSESATPESSGSEVEFSHEYWMRHALTLAKRARDEREVPVGAVLVLNNRVIGEGWNRAIGLHDPTAHAEIMALRQGGLVMQNYRLIDATLYVTFEPCVMCAGAMIHSRIGRVVFGVRNAKTGAAGSLMDVLHYPGMNHRVEITEGILADECAALLCYFFRMPRQLGSQILKEHPVENTQLQNEKLYLYYLQNGRDMYVDQELDINRLSDYDVDHIVPQSFLKDDSIDNKVLTRSDKNRGKSDNVPSEEVVKKMKNYWRQLLNAKLITQRKFDNLTKAERGGLSELDKAGFIKRQLVETRQITKHVAQILDSRMNTKYDENDKLIREVKVITLKSKLVSDFRKDFQFYKVREINNYHHAHDAYLNAVVGTALIKKYPKLESEFVYGDYKVYDVRKMIAKSEQEIGKATAKYFFYSNIMNFFKTEITLANGEIRKRPLIETNGETGEIVWDKGRDFATVRKVLSMPQVNIVKKTEVQTGGFSKESILPKRNSDKLIARKKDWDPKKYGGFDSPTVAYSVLVVAKVEKGKSKKLKSVKELLGITIMERSSFEKNPIDFLEAKGYKEVKKDLIIKLPKYSLFELENGRKRMLASAGELQKGNELALPSKYVNFLYLASHYEKLKGSPEDNEQKQLFVEQHKHYLDEIIEQISEFSKRVILADANLDKVLSAYNKHRDKPIREQAENIIHLFTLTNLGAPAAFKYFDTTIDRKRYTSTKEVLDATLIHQSITGLYETRIDLSQLGGD

SEQ ID NO: 293 - protein, 1484 aa, synthetic construct
  REGION 1..1484: note = 117 Cas9 delta 1017-1069 polypeptide sequence
MDKKYSIGLAIGTNSVGWAVITDEYKVPSKKFKVLGNTDRHSIKKNLIGALLFDSGETAEATRLKRTARRRYTRRKNRICYLQEIFSNEMAKVDDSFFHRLEESFLVEEDKKHERHPIFGNIVDEVAYHEKYPTIYHLRKKLVDSTDKADLRLIYLALAHMIKFRGHFLIEGDLNPDNSDVDKLFIQLVQTYNQLFEENPINASGVDAKAILSARLSKSRRLENLIAQLPGEKKNGLFGNLIALSLGLTPNFKSNFDLAEDAKLQLSKDTYDDDLDNLLAQIGDQYADLFLAAKNLSDAILLSDILRVNTEITKAPLSASMIKRYDEHHQDLTLLKALVRQQLPEKYKEIFFDQSKNGYAGYIDGGASQEEFYKFIKPILEKMDGTEELLVKLNREDLLRKQRTFDNGSIPHQIHLGELHAILRRQEDFYPFLKDNREKIEKILTFRIPYYVGPLARGNSRFAWMTRKSEETITPWNFEEVVDKGASAQSFIERMTNFDKNLPNEKVLPKHSLLYEYFTVYNELTKVKYVTEGMRKPAFLSGEQKKAIVDLLFKTNRKVTVKQLKEDYFKKIECFDSVEISGVEDRFNASLGTYHDLLKIIKDKDFLDNEENEDILEDIVLTLTLFEDREMIEERLKTYAHLFDDKVMKQLKRRRYTGWGRLSRKLINGIRDKQSGKTILDFLKSDGFANRNFMQLIHDDSLTFKEDIQKAQVSGQGDSLHEHIANLAGSPAIKKGILQTVKVVDELVKVMGRHKPENIVIEMARENQTTQKGQKNSRERMKRIEEGIKELGSQILKEHPVENTQLQNEKLYLYYLQNGRDMYVDQELDINRLSDYDVDHIVPQSFLKDDSIDNKVLTRSDKNRGKSDNVPSEEVVKKMKNYWRQLLNAKLITQRKFDNLTKAERGGLSELDKAGFIKRQLVETRQITKHVAQILDSRMNTKYDENDKLIREVKVITLKSKLVSDFRKDFQFYKVREINNYHHAHDAYLNAVVGTALIKKYPKLESEFVYGDYKVYSSGSEVEFSHEYWMRHALTLAKRARDEREVPVGAVLVLNNRVIGEGWNRAIGLHDPTAHAEIMALRQGGLVMQNYRLIDATLYVTFEPCVMCAGAMIHSRIGRVVFGVRNAKTGAAGSLMDVLHYPGMNHRVEITEGILADECAALLCYFFRMPRQVFNAQKKAQSSTDGEIVWDKGRDFATVRKVLSMPQVNIVKKTEVQTGGFSKESILPKRNSDKLIARKKDWDPKKYGGFDSPTVAYSVLVVAKVEKGKSKKLKSVKELLGITIMERSSFEKNPIDFLEAKGYKEVKKDLIIKLPKYSLFELENGRKRMLASAGELQKGNELALPSKYVNFLYLASHYEKLKGSPEDNEQKQLFVEQHKHYLDEIIEQISEFSKRVILADANLDKVLSAYNKHRDKPIREQAENIIHLFTLTNLGAPAAFKYFDTTIDRKRYTSTKEVLDATLIHQSITGLYETRIDLSQLGGD

SEQ ID NO: 294 - protein, 1554 aa, synthetic construct
  REGION 1..1554: note = 118 Cas9 TadA-CP116ins 1067 polypeptide sequence
MDKKYSIGLAIGTNSVGWAVITDEYKVPSKKFKVLGNTDRHSIKKNLIGALLFDSGETAEATRLKRTARRRYTRRKNRICYLQEIFSNEMAKVDDSFFHRLEESFLVEEDKKHERHPIFGNIVDEVAYHEKYPTIYHLRKKLVDSTDKADLRLIYLALAHMIKFRGHFLIEGDLNPDNSDVDKLFIQLVQTYNQLFEENPINASGVDAKAILSARLSKSRRLENLIAQLPGEKKNGLFGNLIALSLGLTPNFKSNFDLAEDAKLQLSKDTYDDDLDNLLAQIGDQYADLFLAAKNLSDAILLSDILRVNTEITKAPLSASMIKRYDEHHQDLTLLKALVRQQLPEKYKEIFFDQSKNGYAGYIDGGASQEEFYKFIKPILEKMDGTEELLVKLNREDLLRKQRTFDNGSIPHQIHLGELHAILRRQEDFYPFLKDNREKIEKILTFRIPYYVGPLARGNSRFAWMTRKSEETITPWNFEEVVDKGASAQSFIERMTNFDKNLPNEKVLPKHSLLYEYFTVYNELTKVKYVTEGMRKPAFLSGEQKKAIVDLLFKTNRKVTVKQLKEDYFKKIECFDSVEISGVEDRFNASLGTYHDLLKIIKDKDFLDNEENEDILEDIVLTLTLFEDREMIEERLKTYAHLFDDKVMKQLKRRRYTGWGRLSRKLINGIRDKQSGKTILDFLKSDGFANRNFMQLIHDDSLTFKEDIQKAQVSGQGDSLHEHIANLAGSPAIKKGILQTVKVVDELVKVMGRHKPENIVIEMARENQTTQKGQKNSRERMKRIEEGIKELGSQILKEHPVENTQLQNEKLYLYYLQNGRDMYVDQELDINRLSDYDVDHIVPQSFLKDDSIDNKVLTRSDKNRGKSDNVPSEEVVKKMKNYWRQLLNAKLITQRKFDNLTKAERGGLSELDKAGFIKRQLVETRQITKHVAQILDSRMNTKYDENDKLIREVKVITLKSKLVSDFRKDFQFYKVREINNYHHAHDAYLNAVVGTALIKKYPKLESEFVYGDYKVYDVRKMIAKSEQEIGKATAKYFFYSNIMNFFKTEITLANGEIRKRPLIETNMNHRVEITEGILADECAALLCYFFRMPRQVFNAQKKAQSSTDGSSGSETPGTSESATPESSGSEVEFSHEYWMRHALTLAKRARDEREVPVGAVLVLNNRVIGEGWNRAIGLHDPTAHAEIMALRQGGLVMQNYRLIDATLYVTFEPCVMCAGAMIHSRIGRVVFGVRNAKTGAAGSLMDVLHYPGGETGEIVWDKGRDFATVRKVLSMPQVNIVKKTEVQTGGFSKESILPKRNSDKLIARKKDWDPKKYGGFDSPTVAYSVLVVAKVEKGKSKKLKSVKELLGITIMERSSFEKNPIDFLEAKGYKEVKKDLIIKLPKYSLFELENGRKRMLASAGELQKGNELALPSKYVNFLYLASHYEKLKGSPEDNEQKQLFVEQHKHYLDEIIEQISEFSKRVILADANLDKVLSAYNKHRDKPIREQAENIIHLFTLTNLGAPAAFKYFDTTIDRKRYTSTKEVLDATLIHQSITGLYETRIDLSQLGGD

SEQ ID NO: 295 - protein, 1554 aa, synthetic construct
  REGION 1..1554: note = 119 Cas9 TadAins 701 polypeptide sequence
MDKKYSIGLAIGTNSVGWAVITDEYKVPSKKFKVLGNTDRHSIKKNLIGALLFDSGETAEATRLKRTARRRYTRRKNRICYLQEIFSNEMAKVDDSFFHRLEESFLVEEDKKHERHPIFGNIVDEVAYHEKYPTIYHLRKKLVDSTDKADLRLIYLALAHMIKFRGHFLIEGDLNPDNSDVDKLFIQLVQTYNQLFEENPINASGVDAKAILSARLSKSRRLENLIAQLPGEKKNGLFGNLIALSLGLTPNFKSNFDLAEDAKLQLSKDTYDDDLDNLLAQIGDQYADLFLAAKNLSDAILLSDILRVNTEITKAPLSASMIKRYDEHHQDLTLLKALVRQQLPEKYKEIFFDQSKNGYAGYIDGGASQEEFYKFIKPILEKMDGTEELLVKLNREDLLRKQRTFDNGSIPHQIHLGELHAILRRQEDFYPFLKDNREKIEKILTFRIPYYVGPLARGNSRFAWMTRKSEETITPWNFEEVVDKGASAQSFIERMTNFDKNLPNEKVLPKHSLLYEYFTVYNELTKVKYVTEGMRKPAFLSGEQKKAIVDLLFKTNRKVTVKQLKEDYFKKIECFDSVEISGVEDRFNASLGTYHDLLKIIKDKDFLDNEENEDILEDIVLTLTLFEDREMIEERLKTYAHLFDDKVMKQLKRRRYTGWGRLSRKLINGIRDKQSGKTILDFLKSDGFANRNFMQLIHDDSGSSGSETPGTSESATPESSGSEVEFSHEYWMRHALTLAKRARDEREVPVGAVLVLNNRVIGEGWNRAIGLHDPTAHAEIMALRQGGLVMQNYRLIDATLYVTFEPCVMCAGAMIHSRIGRVVFGVRNAKTGAAGSLMDVLHYPGMNHRVEITEGILADECAALLCYFFRMPRQVFNAQKKAQSSTDLTFKEDIQKAQVSGQGDSLHEHIANLAGSPAIKKGILQTVKVVDELVKVMGRHKPENIVIEMARENQTTQKGQKNSRERMKRIEEGIKELGSQILKEHPVENTQLQNEKLYLYYLQNGRDMYVDQELDINRLSDYDVDHIVPQSFLKDDSIDNKVLTRSDKNRGKSDNVPSEEVVKKMKNYWRQLLNAKLITQRKFDNLTKAERGGLSELDKAGFIKRQLVETRQITKHVAQILDSRMNTKYDENDKLIREVKVITLKSKLVSDFRKDFQFYKVREINNYHHAHDAYLNAVVGTALIKKYPKLESEFVYGDYKVYDVRKMIAKSEQEIGKATAKYFFYSNIMNFFKTEITLANGEIRKRPLIETNGETGEIVWDKGRDFATVRKVLSMPQVNIVKKTEVQTGGFSKESILPKRNSDKLIARKKDWDPKKYGGFDSPTVAYSVLVVAKVEKGKSKKLKSVKELLGITIMERSSFEKNPIDFLEAKGYKEVKKDLIIKLPKYSLFELENGRKRMLASAGELQKGNELALPSKYVNFLYLASHYEKLKGSPEDNEQKQLFVEQHKHYLDEIIEQISEFSKRVILADANLDKVLSAYNKHRDKPIREQAENIIHLFTLTNLGAPAAFKYFDTTIDRKRYTSTKEVLDATLIHQSITGLYETRIDLSQLGGD

SEQ ID NO: 296 - protein, 1554 aa, synthetic construct
  REGION 1..1554: note = 120 Cas9 TadACP136ins 1248 polypeptide sequence
MDKKYSIGLAIGTNSVGWAVITDEYKVPSKKFKVLGNTDRHSIKKNLIGALLFDSGETAEATRLKRTARRRYTRRKNRICYLQEIFSNEMAKVDDSFFHRLEESFLVEEDKKHERHPIFGNIVDEVAYHEKYPTIYHLRKKLVDSTDKADLRLIYLALAHMIKFRGHFLIEGDLNPDNSDVDKLFIQLVQTYNQLFEENPINASGVDAKAILSARLSKSRRLENLIAQLPGEKKNGLFGNLIALSLGLTPNFKSNFDLAEDAKLQLSKDTYDDDLDNLLAQIGDQYADLFLAAKNLSDAILLSDILRVNTEITKAPLSASMIKRYDEHHQDLTLLKALVRQQLPEKYKEIFFDQSKNGYAGYIDGGASQEEFYKFIKPILEKMDGTEELLVKLNREDLLRKQRTFDNGSIPHQIHLGELHAILRRQEDFYPFLKDNREKIEKILTFRIPYYVGPLARGNSRFAWMTRKSEETITPWNFEEVVDKGASAQSFIERMTNFDKNLPNEKVLPKHSLLYEYFTVYNELTKVKYVTEGMRKPAFLSGEQKKAIVDLLFKTNRKVTVKQLKEDYFKKIECFDSVEISGVEDRFNASLGTYHDLLKIIKDKDFLDNEENEDILEDIVLTLTLFEDREMIEERLKTYAHLFDDKVMKQLKRRRYTGWGRLSRKLINGIRDKQSGKTILDFLKSDGFANRNFMQLIHDDSLTFKEDIQKAQVSGQGDSLHEHIANLAGSPAIKKGILQTVKVVDELVKVMGRHKPENIVIEMARENQTTQKGQKNSRERMKRIEEGIKELGSQILKEHPVENTQLQNEKLYLYYLQNGRDMYVDQELDINRLSDYDVDHIVPQSFLKDDSIDNKVLTRSDKNRGKSDNVPSEEVVKKMKNYWRQLLNAKLITQRKFDNLTKAERGGLSELDKAGFIKRQLVETRQITKHVAQILDSRMNTKYDENDKLIREVKVITLKSKLVSDFRKDFQFYKVREINNYHHAHDAYLNAVVGTALIKKYPKLESEFVYGDYKVYDVRKMIAKSEQEIGKATAKYFFYSNIMNFFKTEITLANGEIRKRPLIETNGETGEIVWDKGRDFATVRKVLSMPQVNIVKKTEVQTGGFSKESILPKRNSDKLIARKKDWDPKKYGGFDSPTVAYSVLVVAKVEKGKSKKLKSVKELLGITIMERSSFEKNPIDFLEAKGYKEVKKDLIIKLPKYSLFELENGRKRMLASAGELQKGNELALPSKYVNFLYLASHYEKLKGSMNHRVEITEGILADECAALLCYFFRMPRQVFNAQKKAQSSTDGSSGSETPGTSESATPESSGSEVEFSHEYWMRHALTLAKRARDEREVPVGAVLVLNNRVIGEGWNRAIGLHDPTAHAEIMALRQGGLVMQNYRLIDATLYVTFEPCVMCAGAMIHSRIGRVVFGVRNAKTGAAGSLMDVLHYPGPEDNEQKQLFVEQHKHYLDEIIEQISEFSKRVILADANLDKVLSAYNKHRDKPIREQAENIIHLFTLTNLGAPAAFKYFDTTIDRKRYTSTKEVLDATLIHQSITGLYETRIDLSQLGGD

SEQ ID NO: 297 - protein, 1554 aa, synthetic construct
  REGION 1..1554: note = 121 Cas9 TadACP136ins 1052 polypeptide sequence
MDKKYSIGLAIGTNSVGWAVITDEYKVPSKKFKVLGNTDRHSIKKNLIGALLFDSGETAEATRLKRTARRRYTRRKNRICYLQEIFSNEMAKVDDSFFHRLEESFLVEEDKKHERHPIFGNIVDEVAYHEKYPTIYHLRKKLVDSTDKADLRLIYLALAHMIKFRGHFLIEGDLNPDNSDVDKLFIQLVQTYNQLFEENPINASGVDAKAILSARLSKSRRLENLIAQLPGEKKNGLFGNLIALSLGLTPNFKSNFDLAEDAKLQLSKDTYDDDLDNLLAQIGDQYADLFLAAKNLSDAILLSDILRVNTEITKAPLSASMIKRYDEHHQDLTLLKALVRQQLPEKYKEIFFDQSKNGYAGYIDGGASQEEFYKFIKPILEKMDGTEELLVKLNREDLLRKQRTFDNGSIPHQIHLGELHAILRRQEDFYPFLKDNREKIEKILTFRIPYYVGPLARGNSRFAWMTRKSEETITPWNFEEVVDKGASAQSFIERMTNFDKNLPNEKVLPKHSLLYEYFTVYNELTKVKYVTEGMRKPAFLSGEQKKAIVDLLFKTNRKVTVKQLKEDYFKKIECFDSVEISGVEDRFNASLGTYHDLLKIIKDKDFLDNEENEDILEDIVLTLTLFEDREMIEERLKTYAHLFDDKVMKQLKRRRYTGWGRLSRKLINGIRDKQSGKTILDFLKSDGFANRNFMQLIHDDSLTFKEDIQKAQVSGQGDSLHEHIANLAGSPAIKKGILQTVKVVDELVKVMGRHKPENIVIEMARENQTTQKGQKNSRERMKRIEEGIKELGSQILKEHPVENTQLQNEKLYLYYLQNGRDMYVDQELDINRLSDYDVDHIVPQSFLKDDSIDNKVLTRSDKNRGKSDNVPSEEVVKKMKNYWRQLLNAKLITQRKFDNLTKAERGGLSELDKAGFIKRQLVETRQITKHVAQILDSRMNTKYDENDKLIREVKVITLKSKLVSDFRKDFQFYKVREINNYHHAHDAYLNAVVGTALIKKYPKLESEFVYGDYKVYDVRKMIAKSEQEIGKATAKYFFYSNIMNFFKTEITLAMNHRVEITEGILADECAALLCYFFRMPRQVFNAQKKAQSSTDGSSGSETPGTSESATPESSGSEVEFSHEYWMRHALTLAKRARDEREVPVGAVLVLNNRVIGEGWNRAIGLHDPTAHAEIMALRQGGLVMQNYRLIDATLYVTFEPCVMCAGAMIHSRIGRVVFGVRNAKTGAAGSLMDVLHYPGNGEIRKRPLIETNGETGEIVWDKGRDFATVRKVLSMPQVNIVKKTEVQTGGFSKESILPKRNSDKLIARKKDWDPKKYGGFDSPTVAYSVLVVAKVEKGKSKKLKSVKELLGITIMERSSFEKNPIDFLEAKGYKEVKKDLIIKLPKYSLFELENGRKRMLASAGELQKGNELALPSKYVNFLYLASHYEKLKGSPEDNEQKQLFVEQHKHYLDEIIEQISEFSKRVILADANLDKVLSAYNKHRDKPIREQAENIIHLFTLTNLGAPAAFKYFDTTIDRKRYTSTKEVLDATLIHQSITGLYETRIDLSQLGGD

SEQ ID NO: 298 - protein, 1554 aa, synthetic construct
  REGION 1..1554: note = 122 Cas9 TadACP136ins 1041 polypeptide sequence
MDKKYSIGLAIGTNSVGWAVITDEYKVPSKKFKVLGNTDRHSIKKNLIGALLFDSGETAEATRLKRTARRRYTRRKNRICYLQEIFSNEMAKVDDSFFHRLEESFLVEEDKKHERHPIFGNIVDEVAYHEKYPTIYHLRKKLVDSTDKADLRLIYLALAHMIKFRGHFLIEGDLNPDNSDVDKLFIQLVQTYNQLFEENPINASGVDAKAILSARLSKSRRLENLIAQLPGEKKNGLFGNLIALSLGLTPNFKSNFDLAEDAKLQLSKDTYDDDLDNLLAQIGDQYADLFLAAKNLSDAILLSDILRVNTEITKAPLSASMIKRYDEHHQDLTLLKALVRQQLPEKYKEIFFDQSKNGYAGYIDGGASQEEFYKFIKPILEKMDGTEELLVKLNREDLLRKQRTFDNGSIPHQIHLGELHAILRRQEDFYPFLKDNREKIEKILTFRIPYYVGPLARGNSRFAWMTRKSEETITPWNFEEVVDKGASAQSFIERMTNFDKNLPNEKVLPKHSLLYEYFTVYNELTKVKYVTEGMRKPAFLSGEQKKAIVDLLFKTNRKVTVKQLKEDYFKKIECFDSVEISGVEDRFNASLGTYHDLLKIIKDKDFLDNEENEDILEDIVLTLTLFEDREMIEERLKTYAHLFDDKVMKQLKRRRYTGWGRLSRKLINGIRDKQSGKTILDFLKSDGFANRNFMQLIHDDSLTFKEDIQKAQVSGQGDSLHEHIANLAGSPAIKKGILQTVKVVDELVKVMGRHKPENIVIEMARENQTTQKGQKNSRERMKRIEEGIKELGSQILKEHPVENTQLQNEKLYLYYLQNGRDMYVDQELDINRLSDYDVDHIVPQSFLKDDSIDNKVLTRSDKNRGKSDNVPSEEVVKKMKNYWRQLLNAKLITQRKFDNLTKAERGGLSELDKAGFIKRQLVETRQITKHVAQILDSRMNTKYDENDKLIREVKVITLKSKLVSDFRKDFQFYKVREINNYHHAHDAYLNAVVGTALIKKYPKLESEFVYGDYKVYDVRKMIAKSEQEIGKATAKYFFYSMNHRVEITEGILADECAALLCYFFRMPRQVFNAQKKAQSSTDGSSGSETPGTSESATPESSGSEVEFSHEYWMRHALTLAKRARDEREVPVGAVLVLNNRVIGEGWNRAIGLHDPTAHAEIMALRQGGLVMQNYRLIDATLYVTFEPCVMCAGAMIHSRIGRVVFGVRNAKTGAAGSLMDVLHYPGNIMNFFKTEITLANGEIRKRPLIETNGETGEIVWDKGRDFATVRKVLSMPQVNIVKKTEVQTGGFSKESILPKRNSDKLIARKKDWDPKKYGGFDSPTVAYSVLVVAKVEKGKSKKLKSVKELLGITIMERSSFEKNPIDFLEAKGYKEVKKDLIIKLPKYSLFELENGRKRMLASAGELQKGNELALPSKYVNFLYLASHYEKLKGSPEDNEQKQLFVEQHKHYLDEIIEQISEFSKRVILADANLDKVLSAYNKHRDKPIREQAENIIHLFTLTNLGAPAAFKYFDTTIDRKRYTSTKEVLDATLIHQSITGLYETRIDLSQLGGD

SEQ ID NO: 299 - protein, 1554 aa, synthetic construct
  REGION 1..1554: note = 123 Cas9 TadACP139ins 1299 polypeptide sequence
MDKKYSIGLAIGTNSVGWAVITDEYKVPSKKFKVLGNTDRHSIKKNLIGALLFDSGETAEATRLKRTARRRYTRRKNRICYLQEIFSNEMAKVDDSFFHRLEESFLVEEDKKHERHPIFGNIVDEVAYHEKYPTIYHLRKKLVDSTDKADLRLIYLALAHMIKFRGHFLIEGDLNPDNSDVDKLFIQLVQTYNQLFEENPINASGVDAKAILSARLSKSRRLENLIAQLPGEKKNGLFGNLIALSLGLTPNFKSNFDLAEDAKLQLSKDTYDDDLDNLLAQIGDQYADLFLAAKNLSDAILLSDILRVNTEITKAPLSASMIKRYDEHHQDLTLLKALVRQQLPEKYKEIFFDQSKNGYAGYIDGGASQEEFYKFIKPILEKMDGTEELLVKLNREDLLRKQRTFDNGSIPHQIHLGELHAILRRQEDFYPFLKDNREKIEKILTFRIPYYVGPLARGNSRFAWMTRKSEETITPWNFEEVVDKGASAQSFIERMTNFDKNLPNEKVLPKHSLLYEYFTVYNELTKVKYVTEGMRKPAFLSGEQKKAIVDLLFKTNRKVTVKQLKEDYFKKIECFDSVEISGVEDRFNASLGTYHDLLKIIKDKDFLDNEENEDILEDIVLTLTLFEDREMIEERLKTYAHLFDDKVMKQLKRRRYTGWGRLSRKLINGIRDKQSGKTILDFLKSDGFANRNFMQLIHDDSLTFKEDIQKAQVSGQGDSLHEHIANLAGSPAIKKGILQTVKVVDELVKVMGRHKPENIVIEMARENQTTQKGQKNSRERMKRIEEGIKELGSQILKEHPVENTQLQNEKLYLYYLQNGRDMYVDQELDINRLSDYDVDHIVPQSFLKDDSIDNKVLTRSDKNRGKSDNVPSEEVVKKMKNYWRQLLNAKLITQRKFDNLTKAERGGLSELDKAGFIKRQLVETRQITKHVAQILDSRMNTKYDENDKLIREVKVITLKSKLVSDFRKDFQFYKVREINNYHHAHDAYLNAVVGTALIKKYPKLESEFVYGDYKVYDVRKMIAKSEQEIGKATAKYFFYSNIMNFFKTEITLANGEIRKRPLIETNGETGEIVWDKGRDFATVRKVLSMPQVNIVKKTEVQTGGFSKESILPKRNSDKLIARKKDWDPKKYGGFDSPTVAYSVLVVAKVEKGKSKKLKSVKELLGITIMERSSFEKNPIDFLEAKGYKEVKKDLIIKLPKYSLFELENGRKRMLASAGELQKGNELALPSKYVNFLYLASHYEKLKGSPEDNEQKQLFVEQHKHYLDEIIEQISEFSKRVILADANLDKVLSAYNKHRMNHRVEITEGILADECAALLCYFFRMPRQVFNAQKKAQSSTDGSSGSETPGTSESATPESSGSEVEFSHEYWMRHALTLAKRARDEREVPVGAVLVLNNRVIGEGWNRAIGLHDPTAHAEIMALRQGGLVMQNYRLIDATLYVTFEPCVMCAGAMIHSRIGRVVFGVRNAKTGAAGSLMDVLHYPGDKPIREQAENIIHLFTLTNLGAPAAFKYFDTTIDRKRYTSTKEVLDATLIHQSITGLYETRIDLSQLGGD

SEQ ID NO: 300 - protein, 1454 aa, synthetic construct
  REGION 1..1454: note = 124 Cas9 delta 792-872TadAins polypeptide sequence
MDKKYSIGLAIGTNSVGWAVITDEYKVPSKKFKVLGNTDRHSIKKNLIGALLFDSGETAEATRLKRTARRRYTRRKNRICYLQEIFSNEMAKVDDSFFHRLEESFLVEEDKKHERHPIFGNIVDEVAYHEKYPTIYHLRKKLVDSTDKADLRLIYLALAHMIKFRGHFLIEGDLNPDNSDVDKLFIQLVQTYNQLFEENPINASGVDAKAILSARLSKSRRLENLIAQLPGEKKNGLFGNLIALSLGLTPNFKSNFDLAEDAKLQLSKDTYDDDLDNLLAQIGDQYADLFLAAKNLSDAILLSDILRVNTEITKAPLSASMIKRYDEHHQDLTLLKALVRQQLPEKYKEIFFDQSKNGYAGYIDGGASQEEFYKFIKPILEKMDGTEELLVKLNREDLLRKQRTFDNGSIPHQIHLGELHAILRRQEDFYPFLKDNREKIEKILTFRIPYYVGPLARGNSRFAWMTRKSEETITPWNFEEVVDKGASAQSFIERMTNFDKNLPNEKVLPKHSLLYEYFTVYNELTKVKYVTEGMRKPAFLSGEQKKAIVDLLFKTNRKVTVKQLKEDYFKKIECFDSVEISGVEDRFNASLGTYHDLLKIIKDKDFLDNEENEDILEDIVLTLTLFEDREMIEERLKTYAHLFDDKVMKQLKRRRYTGWGRLSRKLINGIRDKQSGKTILDFLKSDGFANRNFMQLIHDDSLTFKEDIQKAQVSGQGDSLHEHIANLAGSPAIKKGILQTVKVVDELVKVMGRHKPENIVIEMARENQTTQKGQKNSRERMKRIEEGIKELGSEVEFSHEYWMRHALTLAKRARDEREVPVGAVLVLNNRVIGEGWNRAIGLHDPTAHAEIMALRQGGLVMQNYRLIDATLYVTFEPCVMCAGAMIHSRIGRVVFGVRNAKTGAAGSLMDVLHYPGMNHRVEITEGILADECAALLCYFFRMPRQVFNAQKKAQSSTDEEVVKKMKNYWRQLLNAKLITQRKFDNLTKAERGGLSELDKAGFIKRQLVETRQITKHVAQILDSRMNTKYDENDKLIREVKVITLKSKLVSDFRKDFQFYKVREINNYHHAHDAYLNAVVGTALIKKYPKLESEFVYGDYKVYDVRKMIAKSEQEIGKATAKYFFYSNIMNFFKTEITLANGEIRKRPLIETNGETGEIVWDKGRDFATVRKVLSMPQVNIVKKTEVQTGGFSKESILPKRNSDKLIARKKDWDPKKYGGFDSPTVAYSVLVVAKVEKGKSKKLKSVKELLGITIMERSSFEKNPIDFLEAKGYKEVKKDLIIKLPKYSLFELENGRKRMLASAGELQKGNELALPSKYVNFLYLASHYEKLKGSPEDNEQKQLFVEQHKHYLDEIIEQISEFSKRVILADANLDKVLSAYNKHRDKPIREQAENIIHLFTLTNLGAPAAFKYFDTTIDRKRYTSTKEVLDATLIHQSITGLYETRIDLSQLGGD

SEQ ID NO: 301 - protein, 1420 aa, synthetic construct
  REGION 1..1420: note = 125 Cas9 delta 792-906TadAins polypeptide sequence
MDKKYSIGLAIGTNSVGWAVITDEYKVPSKKFKVLGNTDRHSIKKNLIGALLFDSGETAEATRLKRTARRRYTRRKNRICYLQEIFSNEMAKVDDSFFHRLEESFLVEEDKKHERHPIFGNIVDEVAYHEKYPTIYHLRKKLVDSTDKADLRLIYLALAHMIKFRGHFLIEGDLNPDNSDVDKLFIQLVQTYNQLFEENPINASGVDAKAILSARLSKSRRLENLIAQLPGEKKNGLFGNLIALSLGLTPNFKSNFDLAEDAKLQLSKDTYDDDLDNLLAQIGDQYADLFLAAKNLSDAILLSDILRVNTEITKAPLSASMIKRYDEHHQDLTLLKALVRQQLPEKYKEIFFDQSKNGYAGYIDGGASQEEFYKFIKPILEKMDGTEELLVKLNREDLLRKQRTFDNGSIPHQIHLGELHAILRRQEDFYPFLKDNREKIEKILTFRIPYYVGPLARGNSRFAWMTRKSEETITPWNFEEVVDKGASAQSFIERMTNFDKNLPNEKVLPKHSLLYEYFTVYNELTKVKYVTEGMRKPAFLSGEQKKAIVDLLFKTNRKVTVKQLKEDYFKKIECFDSVEISGVEDRFNASLGTYHDLLKIIKDKDFLDNEENEDILEDIVLTLTLFEDREMIEERLKTYAHLFDDKVMKQLKRRRYTGWGRLSRKLINGIRDKQSGKTILDFLKSDGFANRNFMQLIHDDSLTFKEDIQKAQVSGQGDSLHEHIANLAGSPAIKKGILQTVKVVDELVKVMGRHKPENIVIEMARENQTTQKGQKNSRERMKRIEEGIKELGSEVEFSHEYWMRHALTLAKRARDEREVPVGAVLVLNNRVIGEGWNRAIGLHDPTAHAEIMALRQGGLVMQNYRLIDATLYVTFEPCVMCAGAMIHSRIGRVVFGVRNAKTGAAGSLMDVLHYPGMNHRVEITEGILADECAALLCYFFRMPRQVFNAQKKAQSSTDGLSELDKAGFIKRQLVETRQITKHVAQILDSRMNTKYDENDKLIREVKVITLKSKLVSDFRKDFQFYKVREINNYHHAHDAYLNAVVGTALIKKYPKLESEFVYGDYKVYDVRKMIAKSEQEIGKATAKYFFYSNIMNFFKTEITLANGEIRKRPLIETNGETGEIVWDKGRDFATVRKVLSMPQVNIVKKTEVQTGGFSKESILPKRNSDKLIARKKDWDPKKYGGFDSPTVAYSVLVVAKVEKGKSKKLKSVKELLGITIMERSSFEKNPIDFLEAKGYKEVKKDLIIKLPKYSLFELENGRKRMLASAGELQKGNELALPSKYVNFLYLASHYEKLKGSPEDNEQKQLFVEQHKHYLDEIIEQISEFSKRVILADANLDKVLSAYNKHRDKPIREQAENIIHLFTLTNLGAPAAFKYFDTTIDRKRYTSTKEVLDATLIHQSITGLYETRIDLSQLGGD

SEQ ID NO: 302 - protein, 1554 aa, synthetic construct
  REGION 1..1554: note = 126 TadA CP65ins 1003 polypeptide sequence
MDKKYSIGLAIGTNSVGWAVITDEYKVPSKKFKVLGNTDRHSIKKNLIGALLFDSGETAEATRLKRTARRRYTRRKNRICYLQEIFSNEMAKVDDSFFHRLEESFLVEEDKKHERHPIFGNIVDEVAYHEKYPTIYHLRKKLVDSTDKADLRLIYLALAHMIKFRGHFLIEGDLNPDNSDVDKLFIQLVQTYNQLFEENPINASGVDAKAILSARLSKSRRLENLIAQLPGEKKNGLFGNLIALSLGLTPNFKSNFDLAEDAKLQLSKDTYDDDLDNLLAQIGDQYADLFLAAKNLSDAILLSDILRVNTEITKAPLSASMIKRYDEHHQDLTLLKALVRQQLPEKYKEIFFDQSKNGYAGYIDGGASQEEFYKFIKPILEKMDGTEELLVKLNREDLLRKQRTFDNGSIPHQIHLGELHAILRRQEDFYPFLKDNREKIEKILTFRIPYYVGPLARGNSRFAWMTRKSEETITPWNFEEVVDKGASAQSFIERMTNFDKNLPNEKVLPKHSLLYEYFTVYNELTKVKYVTEGMRKPAFLSGEQKKAIVDLLFKTNRKVTVKQLKEDYFKKIECFDSVEISGVEDRFNASLGTYHDLLKIIKDKDFLDNEENEDILEDIVLTLTLFEDREMIEERLKTYAHLFDDKVMKQLKRRRYTGWGRLSRKLINGIRDKQSGKTILDFLKSDGFANRNFMQLIHDDSLTFKEDIQKAQVSGQGDSLHEHIANLAGSPAIKKGILQTVKVVDELVKVMGRHKPENIVIEMARENQTTQKGQKNSRERMKRIEEGIKELGSQILKEHPVENTQLQNEKLYLYYLQNGRDMYVDQELDINRLSDYDVDHIVPQSFLKDDSIDNKVLTRSDKNRGKSDNVPSEEVVKKMKNYWRQLLNAKLITQRKFDNLTKAERGGLSELDKAGFIKRQLVETRQITKHVAQILDSRMNTKYDENDKLIREVKVITLKSKLVSDFRKDFQFYKVREINNYHHAHDAYLNAVVGTALIKKYPKTAHAEIMALRQGGLVMQNYRLIDATLYVTFEPCVMCAGAMIHSRIGRVVFGVRNAKTGAAGSLMDVLHYPGMNHRVEITEGILADECAALLCYFFRMPRQVFNAQKKAQSSTDGSSGSETPGTSESATPESSGSEVEFSHEYWMRHALTLAKRARDEREVPVGAVLVLNNRVIGEGWNRAIGLHDPLESEFVYGDYKVYDVRKMIAKSEQEIGKATAKYFFYSNIMNFFKTEITLANGEIRKRPLIETNGETGEIVWDKGRDFATVRKVLSMPQVNIVKKTEVQTGGFSKESILPKRNSDKLIARKKDWDPKKYGGFDSPTVAYSVLVVAKVEKGKSKKLKSVKELLGITIMERSSFEKNPIDFLEAKGYKEVKKDLIIKLPKYSLFELENGRKRMLASAGELQKGNELALPSKYVNFLYLASHYEKLKGSPEDNEQKQLFVEQHKHYLDEIIEQISEFSKRVILADANLDKVLSAYNKHRDKPIREQAENIIHLFTLTNLGAPAAFKYFDTTIDRKRYTSTKEVLDATLIHQSITGLYETRIDLSQLGGD

SEQ ID NO: 303 - protein, 1554 aa, synthetic construct
  REGION 1..1554: note = 127 TadA CP65ins 1016 polypeptide sequence
MDKKYSIGLAIGTNSVGWAVITDEYKVPSKKFKVLGNTDRHSIKKNLIGALLFDSGETAEATRLKRTARRRYTRRKNRICYLQEIFSNEMAKVDDSFFHRLEESFLVEEDKKHERHPIFGNIVDEVAYHEKYPTIYHLRKKLVDSTDKADLRLIYLALAHMIKFRGHFLIEGDLNPDNSDVDKLFIQLVQTYNQLFEENPINASGVDAKAILSARLSKSRRLENLIAQLPGEKKNGLFGNLIALSLGLTPNFKSNFDLAEDAKLQLSKDTYDDDLDNLLAQIGDQYADLFLAAKNLSDAILLSDILRVNTEITKAPLSASMIKRYDEHHQDLTLLKALVRQQLPEKYKEIFFDQSKNGYAGYIDGGASQEEFYKFIKPILEKMDGTEELLVKLNREDLLRKQRTFDNGSIPHQIHLGELHAILRRQEDFYPFLKDNREKIEKILTFRIPYYVGPLARGNSRFAWMTRKSEETITPWNFEEVVDKGASAQSFIERMTNFDKNLPNEKVLPKHSLLYEYFTVYNELTKVKYVTEGMRKPAFLSGEQKKAIVDLLFKTNRKVTVKQLKEDYFKKIECFDSVEISGVEDRFNASLGTYHDLLKIIKDKDFLDNEENEDILEDIVLTLTLFEDREMIEERLKTYAHLFDDKVMKQLKRRRYTGWGRLSRKLINGIRDKQSGKTILDFLKSDGFANRNFMQLIHDDSLTFKEDIQKAQVSGQGDSLHEHIANLAGSPAIKKGILQTVKVVDELVKVMGRHKPENIVIEMARENQTTQKGQKNSRERMKRIEEGIKELGSQILKEHPVENTQLQNEKLYLYYLQNGRDMYVDQELDINRLSDYDVDHIVPQSFLKDDSIDNKVLTRSDKNRGKSDNVPSEEVVKKMKNYWRQLLNAKLITQRKFDNLTKAERGGLSELDKAGFIKRQLVETRQITKHVAQILDSRMNTKYDENDKLIREVKVITLKSKLVSDFRKDFQFYKVREINNYHHAHDAYLNAVVGTALIKKYPKLESEFVYGDYKVTAHAEIMALRQGGLVMQNYRLIDATLYVTFEPCVMCAGAMIHSRIGRVVFGVRNAKTGAAGSLMDVLHYPGMNHRVEITEGILADECAALLCYFFRMPRQVFNAQKKAQSSTDGSSGSETPGTSESATPESSGSEVEFSHEYWMRHALTLAKRARDEREVPVGAVLVLNNRVIGEGWNRAIGLHDPYDVRKMIAKSEQEIGKATAKYFFYSNIMNFFKTEITLANGEIRKRPLIETNGETGEIVWDKGRDFATVRKVLSMPQVNIVKKTEVQTGGFSKESILPKRNSDKLIARKKDWDPKKYGGFDSPTVAYSVLVVAKVEKGKSKKLKSVKELLGITIMERSSFEKNPIDFLEAKGYKEVKKDLIIKLPKYSLFELENGRKRMLASAGELQKGNELALPSKYVNFLYLASHYEKLKGSPEDNEQKQLFVEQHKHYLDEIIEQISEFSKRVILADANLDKVLSAYNKHRDKPIREQAENIIHLFTLTNLGAPAAFKYFDTTIDRKRYTSTKEVLDATLIHQSITGLYETRIDLSQLGGD

SEQ ID NO: 304 - protein, 1554 aa, synthetic construct
  REGION 1..1554: note = 128 TadA CP65ins 1022 polypeptide sequence
MDKKYSIGLAIGTNSVGWAVITDEYKVPSKKFKVLGNTDRHSIKKNLIGALLFDSGETAEATRLKRTARRRYTRRKNRICYLQEIFSNEMAKVDDSFFHRLEESFLVEEDKKHERHPIFGNIVDEVAYHEKYPTIYHLRKKLVDSTDKADLRLIYLALAHMIKFRGHFLIEGDLNPDNSDVDKLFIQLVQTYNQLFEENPINASGVDAKAILSARLSKSRRLENLIAQLPGEKKNGLFGNLIALSLGLTPNFKSNFDLAEDAKLQLSKDTYDDDLDNLLAQIGDQYADLFLAAKNLSDAILLSDILRVNTEITKAPLSASMIKRYDEHHQDLTLLKALVRQQLPEKYKEIFFDQSKNGYAGYIDGGASQEEFYKFIKPILEKMDGTEELLVKLNREDLLRKQRTFDNGSIPHQIHLGELHAILRRQEDFYPFLKDNREKIEKILTFRIPYYVGPLARGNSRFAWMTRKSEETITPWNFEEVVDKGASAQSFIERMTNFDKNLPNEKVLPKHSLLYEYFTVYNELTKVKYVTEGMRKPAFLSGEQKKAIVDLLFKTNRKVTVKQLKEDYFKKIECFDSVEISGVEDRFNASLGTYHDLLKIIKDKDFLDNEENEDILEDIVLTLTLFEDREMIEERLKTYAHLFDDKVMKQLKRRRYTGWGRLSRKLINGIRDKQSGKTILDFLKSDGFANRNFMQLIHDDSLTFKEDIQKAQVSGQGDSLHEHIANLAGSPAIKKGILQTVKVVDELVKVMGRHKPENIVIEMARENQTTQKGQKNSRERMKRIEEGIKELGSQILKEHPVENTQLQNEKLYLYYLQNGRDMYVDQELDINRLSDYDVDHIVPQSFLKDDSIDNKVLTRSDKNRGKSDNVPSEEVVKKMKNYWRQLLNAKLITQRKFDNLTKAERGGLSELDKAGFIKRQLVETRQITKHVAQILDSRMNTKYDENDKLIREVKVITLKSKLVSDFRKDFQFYKVREINNYHHAHDAYLNAVVGTALIKKYPKLESEFVYGDYKVYDVRKMITAHAEIMALRQGGLVMQNYRLIDATLYVTFEPCVMCAGAMIHSRIGRVVFGVRNAKTGAAGSLMDVLHYPGMNHRVEITEGILADECAALLCYFFRMPRQVFNAQKKAQSSTDGSSGSETPGTSESATPESSGSEVEFSHEYWMRHALTLAKRARDEREVPVGAVLVLNNRVIGEGWNRAIGLHDPAKSEQEIGKATAKYFFYSNIMNFFKTEITLANGEIRKRPLIETNGETGEIVWDKGRDFATVRKVLSMPQVNIVKKTEVQTGGFSKESILPKRNSDKLIARKKDWDPKKYGGFDSPTVAYSVLVVAKVEKGKSKKLKSVKELLGITIMERSSFEKNPIDFLEAKGYKEVKKDLIIKLPKYSLFELENGRKRMLASAGELQKGNELALPSKYVNFLYLASHYEKLKGSPEDNEQKQLFVEQHKHYLDEIIEQISEFSKRVILADANLDKVLSAYNKHRDKPIREQAENIIHLFTLTNLGAPAAFKYFDTTIDRKRYTSTKEVLDATLIHQSITGLYETRIDLSQLGGD

SEQ ID NO: 305 - protein, 1554 aa, synthetic construct
  REGION 1..1554: note = 129 TadA CP65ins 1029 polypeptide sequence
MDKKYSIGLAIGTNSVGWAVITDEYKVPSKKFKVLGNTDRHSIKKNLIGALLFDSGETAEATRLKRTARRRYTRRKNRICYLQEIFSNEMAKVDDSFFHRLEESFLVEEDKKHERHPIFGNIVDEVAYHEKYPTIYHLRKKLVDSTDKADLRLIYLALAHMIKFRGHFLIEGDLNPDNSDVDKLFIQLVQTYNQLFEENPINASGVDAKAILSARLSKSRRLENLIAQLPGEKKNGLFGNLIALSLGLTPNFKSNFDLAEDAKLQLSKDTYDDDLDNLLAQIGDQYADLFLAAKNLSDAILLSDILRVNTEITKAPLSASMIKRYDEHHQDLTLLKALVRQQLPEKYKEIFFDQSKNGYAGYIDGGASQEEFYKFIKPILEKMDGTEELLVKLNREDLLRKQRTFDNGSIPHQIHLGELHAILRRQEDFYPFLKDNREKIEKILTFRIPYYVGPLARGNSRFAWMTRKSEETITPWNFEEVVDKGASAQSFIERMTNFDKNLPNEKVLPKHSLLYEYFTVYNELTKVKYVTEGMRKPAFLSGEQKKAIVDLLFKTNRKVTVKQLKEDYFKKIECFDSVEISGVEDRFNASLGTYHDLLKIIKDKDFLDNEENEDILEDIVLTLTLFEDREMIEERLKTYAHLFDDKVMKQLKRRRYTGWGRLSRKLINGIRDKQSGKTILDFLKSDGFANRNFMQLIHDDSLTFKEDIQKAQVSGQGDSLHEHIANLAGSPAIKKGILQTVKVVDELVKVMGRHKPENIVIEMARENQTTQKGQKNSRERMKRIEEGIKELGSQILKEHPVENTQLQNEKLYLYYLQNGRDMYVDQELDINRLSDYDVDHIVPQSFLKDDSIDNKVLTRSDKNRGKSDNVPSEEVVKKMKNYWRQLLNAKLITQRKFDNLTKAERGGLSELDKAGFIKRQLVETRQITKHVAQILDSRMNTKYDENDKLIREVKVITLKSKLVSDFRKDFQFYKVREINNYHHAHDAYLNAVVGTALIKKYPKLESEFVYGDYKVYDVRKMIAKSEQEITAHAEIMALRQGGLVMQNYRLIDATLYVTFEPCVMCAGAMIHSRIGRVVFGVRNAKTGAAGSLMDVLHYPGMNHRVEITEGILADECAALLCYFFRMPRQVFNAQKKAQSSTDGSSGSETPGTSESATPESSGSEVEFSHEYWMRHALTLAKRARDEREVPVGAVLVLNNRVIGEGWNRAIGLHDPGKATAKYFFYSNIMNFFKTEITLANGEIRKRPLIETNGETGEIVWDKGRDFATVRKVLSMPQVNIVKKTEVQTGGFSKESILPKRNSDKLIARKKDWDPKKYGGFDSPTVAYSVLVVAKVEKGKSKKLKSVKELLGITIMERSSFEKNPIDFLEAKGYKEVKKDLIIKLPKYSLFELENGRKRMLASAGELQKGNELALPSKYVNFLYLASHYEKLKGSPEDNEQKQLFVEQHKHYLDEIIEQISEFSKRVILADANLDKVLSAYNKHRDKPIREQAENIIHLFTLTNLGAPAAFKYFDTTIDRKRYTSTKEVLDATLIHQSITGLYETRIDLSQLGGD

SEQ ID NO: 306 - protein, 1554 aa, synthetic construct
  REGION 1..1554: note = 130 TadA CP65ins 1041 polypeptide sequence
MDKKYSIGLAIGTNSVGWAVITDEYKVPSKKFKVLGNTDRHSIKKNLIGALLFDSGETAEATRLKRTARRRYTRRKNRICYLQEIFSNEMAKVDDSFFHRLEESFLVEEDKKHERHPIFGNIVDEVAYHEKYPTIYHLRKKLVDSTDKADLRLIYLALAHMIKFRGHFLIEGDLNPDNSDVDKLFIQLVQTYNQLFEENPINASGVDAKAILSARLSKSRRLENLIAQLPGEKKNGLFGNLIALSLGLTPNFKSNFDLAEDAKLQLSKDTYDDDLDNLLAQIGDQYADLFLAAKNLSDAILLSDILRVNTEITKAPLSASMIKRYDEHHQDLTLLKALVRQQLPEKYKEIFFDQSKNGYAGYIDGGASQEEFYKFIKPILEKMDGTEELLVKLNREDLLRKQRTFDNGSIPHQIHLGELHAILRRQEDFYPFLKDNREKIEKILTFRIPYYVGPLARGNSRFAWMTRKSEETITPWNFEEVVDKGASAQSFIERMTNFDKNLPNEKVLPKHSLLYEYFTVYNELTKVKYVTEGMRKPAFLSGEQKKAIVDLLFKTNRKVTVKQLKEDYFKKIECFDSVEISGVEDRFNASLGTYHDLLKIIKDKDFLDNEENEDILEDIVLTLTLFEDREMIEERLKTYAHLFDDKVMKQLKRRRYTGWGRLSRKLINGIRDKQSGKTILDFLKSDGFANRNFMQLIHDDSLTFKEDIQKAQVSGQGDSLHEHIANLAGSPAIKKGILQTVKVVDELVKVMGRHKPENIVIEMARENQTTQKGQKNSRERMKRIEEGIKELGSQILKEHPVENTQLQNEKLYLYYLQNGRDMYVDQELDINRLSDYDVDHIVPQSFLKDDSIDNKVLTRSDKNRGKSDNVPSEEVVKKMKNYWRQLLNAKLITQRKFDNLTKAERGGLSELDKAGFIKRQLVETRQITKHVAQILDSRMNTKYDENDKLIREVKVITLKSKLVSDFRKDFQFYKVREINNYHHAHDAYLNAVVGTALIKKYPKLESEFVYGDYKVYDVRKMIAKSEQEIGKATAKYFFYSTAHAEIMALRQGGLVMQNYRLIDATLYVTFEPCVMCAGAMIHSRIGRVVFGVRNAKTGAAGSLMDVLHYPGMNHRVEITEGILADECAALLCYFFRMPRQVFNAQKKAQSSTDGSSGSETPGTSESATPESSGSEVEFSHEYWMRHALTLAKRARDEREVPVGAVLVLNNRVIGEGWNRAIGLHDPNIMNFFKTEITLANGEIRKRPLIETNGETGEIVWDKGRDFATVRKVLSMPQVNIVKKTEVQTGGFSKESILPKRNSDKLIARKKDWDPKKYGGFDSPTVAYSVLVVAKVEKGKSKKLKSVKELLGITIMERSSFEKNPIDFLEAKGYKEVKKDLIIKLPKYSLFELENGRKRMLASAGELQKGNELALPSKYVNFLYLASHYEKLKGSPEDNEQKQLFVEQHKHYLDEIIEQISEFSKRVILADANLDKVLSAYNKHRDKPIREQAENIIHLFTLTNLGAPAAFKYFDTTIDRKRYTSTKEVLDATLIHQSITGLYETRIDLSQLGGD

SEQ ID NO: 307 - protein, 1554 aa, synthetic construct
  REGION 1..1554: note = 131 TadA CP65ins 1054 polypeptide sequence
MDKKYSIGLAIGTNSVGWAVITDEYKVPSKKFKVLGNTDRHSIKKNLIGALLFDSGETAEATRLKRTARRRYTRRKNRICYLQEIFSNEMAKVDDSFFHRLEESFLVEEDKKHERHPIFGNIVDEVAYHEKYPTIYHLRKKLVDSTDKADLRLIYLALAHMIKFRGHFLIEGDLNPDNSDVDKLFIQLVQTYNQLFEENPINASGVDAKAILSARLSKSRRLENLIAQLPGEKKNGLFGNLIALSLGLTPNFKSNFDLAEDAKLQLSKDTYDDDLDNLLAQIGDQYADLFLAAKNLSDAILLSDILRVNTEITKAPLSASMIKRYDEHHQDLTLLKALVRQQLPEKYKEIFFDQSKNGYAGYIDGGASQEEFYKFIKPILEKMDGTEELLVKLNREDLLRKQRTFDNGSIPHQIHLGELHAILRRQEDFYPFLKDNREKIEKILTFRIPYYVGPLARGNSRFAWMTRKSEETITPWNFEEVVDKGASAQSFIERMTNFDKNLPNEKVLPKHSLLYEYFTVYNELTKVKYVTEGMRKPAFLSGEQKKAIVDLLFKTNRKVTVKQLKEDYFKKIECFDSVEISGVEDRFNASLGTYHDLLKIIKDKDFLDNEENEDILEDIVLTLTLFEDREMIEERLKTYAHLFDDKVMKQLKRRRYTGWGRLSRKLINGIRDKQSGKTILDFLKSDGFANRNFMQLIHDDSLTFKEDIQKAQVSGQGDSLHEHIANLAGSPAIKKGILQTVKVVDELVKVMGRHKPENIVIEMARENQTTQKGQKNSRERMKRIEEGIKELGSQILKEHPVENTQLQNEKLYLYYLQNGRDMYVDQELDINRLSDYDVDHIVPQSFLKDDSIDNKVLTRSDKNRGKSDNVPSEEVVKKMKNYWRQLLNAKLITQRKFDNLTKAERGGLSELDKAGFIKRQLVETRQITKHVAQILDSRMNTKYDENDKLIREVKVITLKSKLVSDFRKDFQFYKVREINNYHHAHDAYLNAVVGTALIKKYPKLESEFVYGDYKVYDVRKMIAKSEQEIGKATAKYFFYSNIMNFFKTEITLANTAHAEIMALRQGGLVMQNYRLIDATLYVTFEPCVMCAGAMIHSRIGRVVFGVRNAKTGAAGSLMDVLHYPGMNHRVEITEGILADECAALLCYFFRMPRQVFNAQKKAQSSTDGSSGSETPGTSESATPESSGSEVEFSHEYWMRHALTLAKRARDEREVPVGAVLVLNNRVIGEGWNRAIGLHDPGEIRKRPLIETNGETGEIVWDKGRDFATVRKVLSMPQVNIVKKTEVQTGGFSKESILPKRNSDKLIARKKDWDPKKYGGFDSPTVAYSVLVVAKVEKGKSKKLKSVKELLGITIMERSSFEKNPIDFLEAKGYKEVKKDLIIKLPKYSLFELENGRKRMLASAGELQKGNELALPSKYVNFLYLASHYEKLKGSPEDNEQKQLFVEQHKHYLDEIIEQISEFSKRVILADANLDKVLSAYNKHRDKPIREQAENIIHLFTLTNLGAPAAFKYFDTTIDRKRYTSTKEVLDATLIHQSITGLYETRIDLSQLGGD

SEQ ID NO: 308 - protein, 1554 aa, synthetic construct
  REGION 1..1554: note = 132 TadA CP65ins 1246 polypeptide sequence
MDKKYSIGLAIGTNSVGWAVITDEYKVPSKKFKVLGNTDRHSIKKNLIGALLFDSGETAEATRLKRTARRRYTRRKNRICYLQEIFSNEMAKVDDSFFHRLEESFLVEEDKKHERHPIFGNIVDEVAYHEKYPTIYHLRKKLVDSTDKADLRLIYLALAHMIKFRGHFLIEGDLNPDNSDVDKLFIQLVQTYNQLFEENPINASGVDAKAILSARLSKSRRLENLIAQLPGEKKNGLFGNLIALSLGLTPNFKSNFDLAEDAKLQLSKDTYDDDLDNLLAQIGDQYADLFLAAKNLSDAILLSDILRVNTEITKAPLSASMIKRYDEHHQDLTLLKALVRQQLPEKYKEIFFDQSKNGYAGYIDGGASQEEFYKFIKPILEKMDGTEELLVKLNREDLLRKQRTFDNGSIPHQIHLGELHAILRRQEDFYPFLKDNREKIEKILTFRIPYYVGPLARGNSRFAWMTRKSEETITPWNFEEVVDKGASAQSFIERMTNFDKNLPNEKVLPKHSLLYEYFTVYNELTKVKYVTEGMRKPAFLSGEQKKAIVDLLFKTNRKVTVKQLKEDYFKKIECFDSVEISGVEDRFNASLGTYHDLLKIIKDKDFLDNEENEDILEDIVLTLTLFEDREMIEERLKTYAHLFDDKVMKQLKRRRYTGWGRLSRKLINGIRDKQSGKTILDFLKSDGFANRNFMQLIHDDSLTFKEDIQKAQVSGQGDSLHEHIANLAGSPAIKKGILQTVKVVDELVKVMGRHKPENIVIEMARENQTTQKGQKNSRERMKRIEEGIKELGSQILKEHPVENTQLQNEKLYLYYLQNGRDMYVDQELDINRLSDYDVDHIVPQSFLKDDSIDNKVLTRSDKNRGKSDNVPSEEVVKKMKNYWRQLLNAKLITQRKFDNLTKAERGGLSELDKAGFIKRQLVETRQITKHVAQILDSRMNTKYDENDKLIREVKVITLKSKLVSDFRKDFQFYKVREINNYHHAHDAYLNAVVGTALIKKYPKLESEFVYGDYKVYDVRKMIAKSEQEIGKATAKYFFYSNIMNFFKTEITLANGEIRKRPLIETNGETGEIVWDKGRDFATVRKVLSMPQVNIVKKTEVQTGGFSKESILPKRNSDKLIARKKDWDPKKYGGFDSPTVAYSVLVVAKVEKGKSKKLKSVKELLGITIMERSSFEKNPIDFLEAKGYKEVKKDLIIKLPKYSLFELENGRKRMLASAGELQKGNELALPSKYVNFLYLASHYEKLKGTAHAEIMALRQGGLVMQNYRLIDATLYVTFEPCVMCAGAMIHSRIGRVVFGVRNAKTGAAGSLMDVLHYPGMNHRVEITEGILADECAALLCYFFRMPRQVFNAQKKAQSSTDGSSGSETPGTSESATPESSGSEVEFSHEYWMRHALTLAKRARDEREVPVGAVLVLNNRVIGEGWNRAIGLHDPSPEDNEQKQLFVEQHKHYLDEIIEQISEFSKRVILADANLDKVLSAYNKHRDKPIREQAENIIHLFTLTNLGAPAAFKYFDTTIDRKRYTSTKEVLDATLIHQSITGLYETRIDLSQLGGD

SEQ ID NO: 309 - protein, 160 aa, Staphylococcus aureus
  REGION 1..160: note = MISC_FEATURE - TadA polypeptide sequence
MGSHMTNDIYFMTLAIEEAKKAAQLGEVPIGAIITKDDEVIARAHNLRETLQQPTAHAEHIAIERAAKVLGSWRLEGCTLYVTLEPCVMCAGTIVMSRIPRVVYGADDPKGGCSGSLMNLLQQSNFNHRAIVDKGVLKEACSTLLTTFFKNLRANKKSTN

SEQ ID NO: 310 - protein, 161 aa, Bacillus subtilis
  REGION 1..161: note = MISC_FEATURE - TadA polypeptide sequence
MTQDELYMKEAIKEAKKAEEKGEVPIGAVLVINGEIIARAHNLRETEQRSIAHAEMLVIDEACKALGTWRLEGATLYVTLEPCPMCAGAVVLSRVEKVVFGAFDPKGGCSGTLMNLLQEERFNHQAEVVSGVLEEECGGMLSAFFRELRKKKKAARKNLSE

SEQ ID NO: 311 - protein, 183 aa, Salmonella typhimurium
  REGION 1..183: note = MISC_FEATURE - TadA polypeptide sequence
MPPAFITGVTSLSDVELDHEYWMRHALTLAKRAWDEREVPVGAVLVHNHRVIGEGWNRPIGRHDPTAHAEIMALRQGGLVLQNYRLLDTTLYVTLEPCVMCAGAMVHSRIGRVVFGARDAKTGAAGSLIDVLHHPGMNHRVEIIEGVLRDECATLLSDFFRMRRQEIKALKKADRAEGAGPAV

SEQ ID NO: 312 - protein, 164 aa, Shewanella putrefaciens
  REGION 1..164: note = MISC_FEATURE - TadA polypeptide sequence
MDEYWMQVAMQMAEKAEAAGEVPVGAVLVKDGQQIATGYNLSISQHDPTAHAEILCLRSAGKKLENYRLLDATLYITLEPCAMCAGAMVHSRIARVVYGARDEKTGAAGTVVNLLQHPAFNHQVEVTSGVLAEACSAQLSRFFKRRRDEKKALKLAQRAQQGIE

SEQ ID NO: 313 - protein, 173 aa, Haemophilus influenzae
  REGION 1..173: note = MISC_FEATURE - TadA polypeptide sequence
MDAAKVRSEFDEKMMRYALELADKAEALGEIPVGAVLVDDARNIIGEGWNLSIVQSDPTAHAEIIALRNGAKNIQNYRLLNSTLYVTLEPCTMCAGAILHSRIKRLVFGASDYKTGAIGSRFHFFDDYKMNHTLEITSGVLAEECSQKLSTFFQKRREEKKIEKALLKSLSDK

SEQ ID NO: 314 - protein, 161 aa, Caulobacter crescentus
  REGION 1..161: note = MISC_FEATURE - TadA polypeptide sequence
MRTDESEDQDHRMMRLALDAARAAAEAGETPVGAVILDPSTGEVIATAGNGPIAAHDPTAHAEIAAMRAAAAKLGNYRLTDLTLVVTLEPCAMCAGAISHARIGRVVFGADDPKGGAVVHGPKFFAQPTCHWRPEVTGGVLADESADLLRGFFRARRKAKI

SEQ ID NO: 315 - protein, 179 aa, Geobacter sulfurreducens
  REGION 1..179: note = MISC_FEATURE - TadA polypeptide sequence
MSSLKKTPIRDDAYWMGKAIREAAKAAARDEVPIGAVIVRDGAVIGRGHNLREGSNDPSAHAEMIAIRQAARRSANWRLTGATLYVTLEPCLMCMGAIILARLERVVFGCYDPKGGAAGSLYDLSADPRLNHQVRLSPGVCQEECGTMLSDFFRDLRRRKKAKATPALFIDERKVPPEP

SEQ ID NO: 316 - protein, 167 aa, synthetic construct
  REGION 1..167: note = TadA*8 polypeptide sequence
MSEVEFSHEYWMRHALTLAKRARDEREVPVGAVLVLNNRVIGEGWNRAIGLHDPTAHAEIMALRQGGLVMQNYRLIDATLYVTFEPCVMCAGAMIHSRIGRVVFGVRNAKTGAAGSLMDVLHYPGMNHRVEITEGILADECAALLCTFFRMPRQVFNAQKKAQSSTD

SEQ ID NO: 317 - RNA, 80 nt, synthetic construct
  misc_feature 1..80: note = gRNA scaffold polynucleotide sequence
  source 1..80: mol_type = other RNA
gttttagagctagaaatagcaagttaaaataaggctagtccgttatcaacttgaaaaagtggcaccgagtcggtgctttt

SEQ ID NO: 318 - RNA, 125 nt, synthetic construct
  misc_feature 1..125: note = gRNA scaffold polynucleotide sequence
  source 1..125: mol_type = other RNA
gtttttgtactctcaagatttaagtaactgtacaacgaaacttacacagttacttaaatcttgcagaagctacaaagataaggcttcatgccgaaatcaacaccctgtcattttatggcagggtg

SEQ ID NO: 319 - RNA, 76 nt, Streptococcus pyogenes
  misc_feature 1..76: note = S. pyogenes gRNA scaffold oligonucleotide sequence
  source 1..76: mol_type = other RNA
gttttagagctagaaatagcaagttaaaataaggctagtccgttatcaacttgaaaaagtggcaccgagtcggtgc

SEQ ID NO: 320 - RNA, 84 nt, Staphylococcus aureus
  misc_feature 1..84: note = S. aureus gRNA scaffold oligonucleotide sequence
  source 1..84: mol_type = other RNA
gttttagtactctgtaatgaaaattacagaatctactaaaacaaggcaaaatgccgtgtttatctcgtcaacttgttggcgaga

SEQ ID NO: 321 - RNA, 97 nt, Bacillus hisashii
  misc_feature 1..97: note = BhCas12b gRNA scaffold oligonucleotide sequence
  source 1..97: mol_type = other RNA
gttctgtcttttggtcaggacaaccgtctagctataagtgctgcagggtgtgagaaactcctattgctggacgatgtctcttacgaggcattagcac

SEQ ID NO: 322 - RNA, 88 nt, Bacillus sp.
  misc_feature 1..88: note = BvCas12b gRNA scaffold oligonucleotide sequence
  source 1..88: mol_type = other RNA
gacctatagggtcaatgaatctgtgcgtgtgccataagtaattaaaaattacccaccacaggagcacctgaaaacaggtgcttggcac

SEQ ID NO: 323 - RNA, 80 nt, synthetic construct
  misc_feature 1..80: note = gRNA scaffold nucleotide sequence; oligonucleotide sequence
  modified_base 78..80: mod_base = um
  misc_feature 78..80: note = In embodiments, a nucleotide(s) is linked to the preceding 5' nucleotide by a 3' phosphorothioate internucleotide linkage
  source 1..80: mol_type = other RNA
gttttagagctagaaatagcaagttaaaataaggctagtccgttatcaacttgaaaaagtgggaccgagtcggtgctttt

SEQ ID NO: 324 - RNA, 80 nt, synthetic construct; identical to SEQ ID NO: 317
  misc_feature 1..80: note = gRNA scaffold nucleotide sequence
  misc_feature 78..80: note = In embodiments, a nucleotide(s) is linked to the preceding 5' nucleotide by a 3' phosphorothioate internucleotide linkage
  modified_base 78..80: mod_base = um
  source 1..80: mol_type = other RNA

SEQ ID NO: 325 - RNA, 117 nt, Bacillus hisashii
  misc_feature 1..117: note = BhCas12b gRNA scaffold + guide sequence; oligonucleotide sequence
  misc_feature 1..97: note = BhCas12b sgRNA scaffold
  source 1..117: mol_type = other RNA
gttctgtcttttggtcaggacaaccgtctagctataagtgctgcagggtgtgagaaactcctattgctggacgatgtctcttacgaggcattagcacnnnnnnnnnnnnnnnnnnnn

SEQ ID NO: 326 - RNA, 108 nt, Bacillus sp.
  misc_feature 1..108: note = BvCas12b gRNA scaffold + guide sequence; oligonucleotide sequence
  misc_feature 1..88: note = BvCas12b gRNA scaffold
  source 1..108: mol_type = other RNA
gacctatagggtcaatgaatctgtgcgtgtgccataagtaattaaaaattacccaccacaggagcacctgaaaacaggtgcttggcacnnnnnnnnnnnnnnnnnnnn

SEQ ID NO: 327 - RNA, 119 nt, Alicyclobacillus acidiphilus
  misc_feature 1..119: note = AaCas12b gRNA scaffold + guide sequence; oligonucleotide sequence
  misc_feature 1..99: note = AaCas12b gRNA scaffold
  source 1..119: mol_type = other RNA
gtctaaaggacagaatttttcaacgggtgtgccaatggccactttccaggtggcaaagcccgttgaacttctcaaaaagaacgatctgagaagtggcacnnnnnnnnnnnnnnnnnnnn

SEQ ID NO: 328 - protein, 29 aa, synthetic construct
  REGION 1..29: note = synthetic polypeptide sequence
PKKKRKVEGADKRTADGSEFESPKKKRKV

SEQ ID NO: 329 - protein, 23 aa, synthetic construct
  REGION 1..23: note = synthetic peptide sequence
RKSGKIAAIVVKRPRKPKKKRKV

SEQ ID NO: 330 - protein, 8 aa, synthetic construct
  REGION 1..8: note = synthetic peptide sequence
SGGSSGGS

SEQ ID NO: 331 - protein, 1609 aa, synthetic construct
  REGION 1..1609: note = pNMG-B335ABE8.1_Y147T_CP5_NGC PAM_monomer polypeptide sequence
MSEVEFSHEYWMRHALTLAKRARDEREVPVGAVLVLNNRVIGEGWNRAIGLHDPTAHAEIMALRQGGLVMQNYRLIDATLYVTFEPCVMCAGAMIHSRIGRVVFGVRNAKTGAAGSLMDVLHYPGMNHRVEITEGILADECAALLCTFFRMPRQVFNAQKKAQSSTDSGGSSGGSSGSETPGTSESATPESSGGSSGGSEIGKATAKYFFYSNIMNFFKTEITLANGEIRKRPLIETNGETGEIVWDKGRDFATVRKVLSMPQVNIVKKTEVQTGGFSKESILPKRNSDKLIARKKDWDPKKYGGFMQPTVAYSVLVVAKVEKGKSKKLKSVKELLGITIMERSSFEKNPIDFLEAKGYKEVKKDLIIKLPKYSLFELENGRKRMLASAKFLQKGNELALPSKYVNFLYLASHYEKLKGSPEDNEQKQLFVEQHKHYLDEIIEQISEFSKRVILADANLDKVLSAYNKHRDKPIREQAENIIHLFTLTNLGAPRAFKYFDTTIARKEYRSTKEVLDATLIHQSITGLYETRIDLSQLGGDGGSGGSGGSGGSGGSGGSGGMDKKYSIGLAIGTNSVGWAVITDEYKVPSKKFKVLGNTDRHSIKKNLIGALLFDSGETAEATRLKRTARRRYTRRKNRICYLQEIFSNEMAKVDDSFFHRLEESFLVEEDKKHERHPIFGNIVDEVAYHEKYPTIYHLRKKLVDSTDKADLRLIYLALAHMIKFRGHFLIEGDLNPDNSDVDKLFIQLVQTYNQLFEENPINASGVDAKAILSARLSKSRRLENLIAQLPGEKKNGLFGNLIALSLGLTPNFKSNFDLAEDAKLQLSKDTYDDDLDNLLAQIGDQYADLFLAAKNLSDAILLSDILRVNTEITKAPLSASMIKRYDEHHQDLTLLKALVRQQLPEKYKEIFFDQSKNGYAGYIDGGASQEEFYKFIKPILEKMDGTEELLVKLNREDLLRKQRTFDNGSIPHQIHLGELHAILRRQEDFYPFLKDNREKIEKILTFRIPYYVGPLARGNSRFAWMTRKSEETITPWNFEEVVDKGASAQSFIERMTNFDKNLPNEKVLPKHSLLYEYFTVYNELTKVKYVTEGMRKPAFLSGEQKKAIVDLLFKTNRKVTVKQLKEDYFKKIECFDSVEISGVEDRFNASLGTYHDLLKIIKDKDFLDNEENEDILEDIVLTLTLFEDREMIEERLKTYAHLFDDKVMKQLKRRRYTGWGRLSRKLINGIRDKQSGKTILDFLKSDGFANRNFMQLIHDDSLTFKEDIQKAQVSGQGDSLHEHIANLAGSPAIKKGILQTVKVVDELVKVMGRHKPENIVIEMARENQTTQKGQKNSRERMKRIEEGIKELGSQILKEHPVENTQLQNEKLYLYYLQNGRDMYVDQELDINRLSDYDVDHIVPQSFLKDDSIDNKVLTRSDKNRGKSDNVPSEEVVKKMKNYWRQLLNAKLITQRKFDNLTKAERGGLSELDKAGFIKRQLVETRQITKHVAQILDSRMNTKYDENDKLIREVKVITLKSKLVSDFRKDFQFYKVREINNYHHAHDAYLNAVVGTALIKKYPKLESEFVYGDYKVYDVRKMIAKSEQEGADKRTADGSEFESPKKKRKV

SEQ ID NO: 332 - protein, 1807 aa, synthetic construct
  REGION 1..1807: note = pNMG-357_ABE8.14 with NGC PAMCP5 polypeptide sequence
  REGION 1..174: note = MISC_FEATURE - Adenosine deaminase sequence
  REGION 175..198: note = MISC_FEATURE - Linker sequence
  REGION 199..365: note = MISC_FEATURE - Adenosine deaminase sequence
  REGION 366..397: note = MISC_FEATURE - Linker sequence
  REGION 398..738: note = MISC_FEATURE - Sequence derived from Cas9
  REGION 739..759: note = MISC_FEATURE - Linker sequence
  REGION 760..1785: note = MISC_FEATURE - Sequence derived from Cas9
  REGION 1786..1807: note = MISC_FEATURE - Bipartite nuclear localization sequence
MSEVEFSHEYWMRHALTLAKRAWDEREVPVGAVLVHNNRVIGEGWNRPIGRHDPTAHAEIMALRQGGLVMQNYRLIDATLYVTLEPCVMCAGAMIHSRIGRVVFGARDAKTGAAGSLMDVLHHPGMNHRVEITEGILADECAALLSDFFRMRRQEIKAQKKAQSSTDGGSSGGSSGSETPGTSESATPESSGGSSGGSMSEVEFSHEYWMRHALTLAKRARDEREVPVGAVLVLNNRVIGEGWNRAIGLHDPTAHAEIMALRQGGLVMQNYRLIDATLYVTFEPCVMCAGAMIHSRIGRVVFGVRNAKTGAAGSLMDVLHYPGMNHRVEITEGILADECAALLCTFFRMPRQVFNAQKKAQSSTDSGGSSGGSSGSETPGTSESATPESSGGSSGGSEIGKATAKYFFYSNIMNFFKTEITLANGEIRKRPLIETNGETGEIVWDKGRDFATVRKVLSMPQVNIVKKTEVQTGGFSKESILPKRNSDKLIARKKDWDPKKYGGFMQPTVAYSVLVVAKVEKGKSKKLKSVKELLGITIMERSSFEKNPIDFLEAKGYKEVKKDLIIKLPKYSLFELENGRKRMLASAKFLQKGNELALPSKYVNFLYLASHYEKLKGSPEDNEQKQLFVEQHKHYLDEIIEQISEFSKRVILADANLDKVLSAYNKHRDKPIREQAENIIHLFTLTNLGAPRAFKYFDTTIARKEYRSTKEVLDATLIHQSITGLYETRIDLSQLGGDGGSGGSGGSGGSGGSGGSGGMDKKYSIGLAIGTNSVGWAVITDEYKVPSKKFKVLGNTDRHSIKKNLIGALLFDSGETAEATRLKRTARRRYTRRKNRICYLQEIFSNEMAKVDDSFFHRLEESFLVEEDKKHERHPIFGNIVDEVAYHEKYPTIYHLRKKLVDSTDKADLRLIYLALAHMIKFRGHFLIEGDLNPDNSDVDKLFIQLVQTYNQLFEENPINASGVDAKAILSARLSKSRRLENLIAQLPGEKKNGLFGNLIALSLGLTPNFKSNFDLAEDAKLQLSKDTYDDDLDNLLAQIGDQYADLFLAAKNLSDAILLSDILRVNTEITKAPLSASMIKRYDEHHQDLTLLKALVRQQLPEKYKEIFFDQSKNGYAGYIDGGASQEEFYKFIKPILEKMDGTEELLVKLNREDLLRKQRTFDNGSIPHQIHLGELHAILRRQEDFYPFLKDNREKIEKILTFRIPYYVGPLARGNSRFAWMTRKSEETITPWNFEEVVDKGASAQSFIERMTNFDKNLPNEKVLPKHSLLYEYFTVYNELTKVKYVTEGMRKPAFLSGEQKKAIVDLLFKTNRKVTVKQLKEDYFKKIECFDSVEISGVEDRFNASLGTYHDLLKIIKDKDFLDNEENEDILEDIVLTLTLFEDREMIEERLKTYAHLFDDKVMKQLKRRRYTGWGRLSRKLINGIRDKQSGKTILDFLKSDGFANRNFMQLIHDDSLTFKEDIQKAQVSGQGDSLHEHIANLAGSPAIKKGILQTVKVVDELVKVMGRHKPENIVIEMARENQTTQKGQKNSRERMKRIEEGIKELGSQILKEHPVENTQLQNEKLYLYYLQNGRDMYVDQELDINRLSDYDVDHIVPQSFLKDDSIDNKVLTRSDKNRGKSDNVPSEEVVKKMKNYWRQLLNAKLITQRKFDNLTKAERGGLSELDKAGFIKRQLVETRQITKHVAQILDSRMNTKYDENDKLIREVKVITLKSKLVSDFRKDFQFYKVREINNYHHAHDAYLNAVVGTALIKKYPKLESEFVYGDYKVYDVRKMIAKSEQEGADKRTADGSEFESPKKKRKV

SEQ ID NO: 333 - protein, 1588 aa, synthetic construct
  REGION 1..1588: note = ABE8.8-m polypeptide sequence
  REGION 1..167: note = MISC_FEATURE - Adenosine deaminase sequence
  REGION 168..199: note = MISC_FEATURE - Linker sequence
  REGION 200..1566: note = MISC_FEATURE - Sequence derived from Cas9
  REGION 1567..1588: note = MISC_FEATURE - Bipartite nuclear localization sequence
MSEVEFSHEYWMRHALTLAKRARDEREVPVGAVLVLNNRVIGEGWNRAIGLHDPTAHAEIMALRQGGLVMQNYRLIDATLYVTFEPCVMCAGAMIHSRIGRVVFGVRNAKTGAAGSLMDVLHHPGMNHRVEITEGILADECAALLCRFFRMPRRVFNAQKKAQSSTDSGGSSGGSSGSETPGTSESATPESSGGSSGGSDKKYSIGLAIGTNSVGWAVITDEYKVPSKKFKVLGNTDRHSIKKNLIGALLFDSGETAEATRLKRTARRRYTRRKNRICYLQEIFSNEMAKVDDSFFHRLEESFLVEEDKKHERHPIFGNIVDEVAYHEKYPTIYHLRKKLVDSTDKADLRLIYLALAHMIKFRGHFLIEGDLNPDNSDVDKLFIQLVQTYNQLFEENPINASGVDAKAILSARLSKSRRLENLIAQLPGEKKNGLFGNLIALSLGLTPNFKSNFDLAEDAKLQLSKDTYDDDLDNLLAQIGDQYADLFLAAKNLSDAILLSDILRVNTEITKAPLSASMIKRYDEHHQDLTLLKALVRQQLPEKYKEIFFDQSKNGYAGYIDGGASQEEFYKFIKPILEKMDGTEELLVKLNREDLLRKQRTFDNGSIPHQIHLGELHAILRRQEDFYPFLKDNREKIEKILTFRIPYYVGPLARGNSRFAWMTRKSEETITPWNFEEVVDKGASAQSFIERMTNFDKNLPNEKVLPKHSLLYEYFTVYNELTKVKYVTEGMRKPAFLSGEQKKAIVDLLFKTNRKVTVKQLKEDYFKKIECFDSVEISGVEDRFNASLGTYHDLLKIIKDKDFLDNEENEDILEDIVLTLTLFEDREMIEERLKTYAHLFDDKVMKQLKRRRYTGWGRLSRKLINGIRDKQSGKTILDFLKSDGFANRNFMQLIHDDSLTFKEDIQKAQVSGQGDSLHEHIANLAGSPAIKKGILQTVKVVDELVKVMGRHKPENIVIEMARENQTTQKGQKNSRERMKRIEEGIKELGSQILKEHPVENTQLQNEKLYLYYLQNGRDMYVDQELDINRLSDYDVDHIVPQSFLKDDSIDNKVLTRSDKNRGKSDNVPSEEVVKKMKNYWRQLLNAKLITQRKFDNLTKAERGGLSELDKAGFIKRQLVETRQITKHVAQILDSRMNTKYDENDKLIREVKVITLKSKLVSDFRKDFQFYKVREINNYHHAHDAYLNAVVGTALIKKYPKLESEFVYGDYKVYDVRKMIAKSEQEIGKATAKYFFYSNIMNFFKTEITLANGEIRKRPLIETNGETGEIVWDKGRDFATVRKVLSMPQVNIVKKTEVQTGGFSKESILPKRNSDKLIARKKDWDPKKYGGFDSPTVAYSVLVVAKVEKGKSKKLKSVKELLGITIMERSSFEKNPIDFLEAKGYKEVKKDLIIKLPKYSLFELENGRKRMLASAGELQKGNELALPSKYVNFLYLASHYEKLKGSPEDNEQKQLFVEQHKHYLDEIIEQISEFSKRVILADANLDKVLSAYNKHRDKPIREQAENIIHLFTLTNLGAPAAFKYFDTTIDRKRYTSTKEVLDATLIHQSITGLYETRIDLSQLGGDEGADKRTADGSEFESPKKKRKV

SEQ ID NO: 334 - protein, 1786 aa, synthetic construct
  REGION 1..1786: note = ABE8.8-d polypeptide sequence
  REGION 1..167: note = MISC_FEATURE - Adenosine deaminase sequence
  REGION 168..199: note = MISC_FEATURE - Linker sequence
  REGION 200..365: note = MISC_FEATURE - Adenosine deaminase sequence
  REGION 366..397: note = MISC_FEATURE - Linker sequence
  REGION 398..1764: note = MISC_FEATURE - Sequence derived from Cas9
  REGION 1765..1786: note = MISC_FEATURE - Bipartite nuclear localization sequence
MSEVEFSHEYWMRHALTLAKRAWDEREVPVGAVLVHNNRVIGEGWNRPIGRHDPTAHAEIMALRQGGLVMQNYRLIDATLYVTLEPCVMCAGAMIHSRIGRVVFGARDAKTGAAGSLMDVLHHPGMNHRVEITEGILADECAALLSDFFRMRRQEIKAQKKAQSSTDSGGSSGGSSGSETPGTSESATPESSGGSSGGSSEVEFSHEYWMRHALTLAKRARDEREVPVGAVLVLNNRVIGEGWNRAIGLHDPTAHAEIMALRQGGLVMQNYRLIDATLYVTFEPCVMCAGAMIHSRIGRVVFGVRNAKTGAAGSLMDVLHHPGMNHRVEITEGILADECAALLCRFFRMPRRVFNAQKKAQSSTDSGGSSGGSSGSETPGTSESATPESSGGSSGGSDKKYSIGLAIGTNSVGWAVITDEYKVPSKKFKVLGNTDRHSIKKNLIGALLFDSGETAEATRLKRTARRRYTRRKNRICYLQEIFSNEMAKVDDSFFHRLEESFLVEEDKKHERHPIFGNIVDEVAYHEKYPTIYHLRKKLVDSTDKADLRLIYLALAHMIKFRGHFLIEGDLNPDNSDVDKLFIQLVQTYNQLFEENPINASGVDAKAILSARLSKSRRLENLIAQLPGEKKNGLFGNLIALSLGLTPNFKSNFDLAEDAKLQLSKDTYDDDLDNLLAQIGDQYADLFLAAKNLSDAILLSDILRVNTEITKAPLSASMIKRYDEHHQDLTLLKALVRQQLPEKYKEIFFDQSKNGYAGYIDGGASQEEFYKFIKPILEKMDGTEELLVKLNREDLLRKQRTFDNGSIPHQIHLGELHAILRRQEDFYPFLKDNREKIEKILTFRIPYYVGPLARGNSRFAWMTRKSEETITPWNFEEVVDKGASAQSFIERMTNFDKNLPNEKVLPKHSLLYEYFTVYNELTKVKYVTEGMRKPAFLSGEQKKAIVDLLFKTNRKVTVKQLKEDYFKKIECFDSVEISGVEDRFNASLGTYHDLLKIIKDKDFLDNEENEDILEDIVLTLTLFEDREMIEERLKTYAHLFDDKVMKQLKRRRYTGWGRLSRKLINGIRDKQSGKTILDFLKSDGFANRNFMQLIHDDSLTFKEDIQKAQVSGQGDSLHEHIANLAGSPAIKKGILQTVKVVDELVKVMGRHKPENIVIEMARENQTTQKGQKNSRERMKRIEEGIKELGSQILKEHPVENTQLQNEKLYLYYLQNGRDMYVDQELDINRLSDYDVDHIVPQSFLKDDSIDNKVLTRSDKNRGKSDNVPSEEVVKKMKNYWRQLLNAKLITQRKFDNLTKAERGGLSELDKAGFIKRQLVETRQITKHVAQILDSRMNTKYDENDKLIREVKVITLKSKLVSDFRKDFQFYKVREINNYHHAHDAYLNAVVGTALIKKYPKLESEFVYGDYKVYDVRKMIAKSEQEIGKATAKYFFYSNIMNFFKTEITLANGEIRKRPLIETNGETGEIVWDKGRDFATVRKVLSMPQVNIVKKTEVQTGGFSKESILPKRNSDKLIARKKDWDPKKYGGFDSPTVAYSVLVVAKVEKGKSKKLKSVKELLGITIMERSSFEKNPIDFLEAKGYKEVKKDLIIKLPKYSLFELENGRKRMLASAGELQKGNELALPSKYVNFLYLASHYEKLKGSPEDNEQKQLFVEQHKHYLDEIIEQISEFSKRVILADANLDKVLSAYNKHRDKPIREQAENIIHLFTLTNLGAPAAFKYFDTTIDRKRYTSTKEVLDATLIHQSITGLYETRIDLSQLGGDEGADKRTADGSEFESPKKKRKV

SEQ ID NO: 335 - protein, 1588 aa, synthetic construct
  REGION 1..1588: note = ABE8.13-m polypeptide sequence
  REGION 1..167: note = MISC_FEATURE - Adenosine deaminase sequence
  REGION 168..199: note = MISC_FEATURE - Linker sequence
  REGION 200..1566: note = MISC_FEATURE - Sequence derived from Cas9
  REGION 1567..1588: note = MISC_FEATURE - Bipartite nuclear localization sequence
MSEVEFSHEYWMRHALTLAKRARDEREVPVGAVLVLNNRVIGEGWNRAIGLHDPTAHAEIMALRQGGLVMQNYRLYDATLYVTFEPCVMCAGAMIHSRIGRVVFGVRNAKTGAAGSLMDVLHHPGMNHRVEITEGILADECAALLCRFFRMPRRVFNAQKKAQSSTDSGGSSGGSSGSETPGTSESATPESSGGSSGGSDKKYSIGLAIGTNSVGWAVITDEYKVPSKKFKVLGNTDRHSIKKNLIGALLFDSGETAEATRLKRTARRRYTRRKNRICYLQEIFSNEMAKVDDSFFHRLEESFLVEEDKKHERHPIFGNIVDEVAYHEKYPTIYHLRKKLVDSTDKADLRLIYLALAHMIKFRGHFLIEGDLNPDNSDVDKLFIQLVQTYNQLFEENPINASGVDAKAILSARLSKSRRLENLIAQLPGEKKNGLFGNLIALSLGLTPNFKSNFDLAEDAKLQLSKDTYDDDLDNLLAQIGDQYADLFLAAKNLSDAILLSDILRVNTEITKAPLSASMIKRYDEHHQDLTLLKALVRQQLPEKYKEIFFDQSKNGYAGYIDGGASQEEFYKFIKPILEKMDGTEELLVKLNREDLLRKQRTFDNGSIPHQIHLGELHAILRRQEDFYPFLKDNREKIEKILTFRIPYYVGPLARGNSRFAWMTRKSEETITPWNFEEVVDKGASAQSFIERMTNFDKNLPNEKVLPKHSLLYEYFTVYNELTKVKYVTEGMRKPAFLSGEQKKAIVDLLFKTNRKVTVKQLKEDYFKKIECFDSVEISGVEDRFNASLGTYHDLLKIIKDKDFLDNEENEDILEDIVLTLTLFEDREMIEERLKTYAHLFDDKVMKQLKRRRYTGWGRLSRKLINGIRDKQSGKTILDFLKSDGFANRNFMQLIHDDSLTFKEDIQKAQVSGQGDSLHEHIANLAGSPAIKKGILQTVKVVDELVKVMGRHKPENIVIEMARENQTTQKGQKNSRERMKRIEEGIKELGSQILKEHPVENTQLQNEKLYLYYLQNGRDMYVDQELDINRLSDYDVDHIVPQSFLKDDSIDNKVLTRSDKNRGKSDNVPSEEVVKKMKNYWRQLLNAKLITQRKFDNLTKAERGGLSELDKAGFIKRQLVETRQITKHVAQILDSRMNTKYDENDKLIREVKVITLKSKLVSDFRKDFQFYKVREINNYHHAHDAYLNAVVGTALIKKYPKLESEFVYGDYKVYDVRKMIAKSEQEIGKATAKYFFYSNIMNFFKTEITLANGEIRKRPLIETNGETGEIVWDKGRDFATVRKVLSMPQVNIVKKTEVQTGGFSKESILPKRNSDKLIARKKDWDPKKYGGFDSPTVAYSVLVVAKVEKGKSKKLKSVKELLGITIMERSSFEKNPIDFLEAKGYKEVKKDLIIKLPKYSLFELENGRKRMLASAGELQKGNELALPSKYVNFLYLASHYEKLKGSPEDNEQKQLFVEQHKHYLDEIIEQISEFSKRVILADANLDKVLSAYNKHRDKPIREQAENIIHLFTLTNLGAPAAFKYFDTTIDRKRYTSTKEVLDATLIHQSITGLYETRIDLSQLGGDEGADKRTADGSEFESPKKKRKV

SEQ ID NO: 336 - protein, 1786 aa, synthetic construct
  REGION 1..1786: note = ABE8.13-d polypeptide sequence
  REGION 1..167: note = MISC_FEATURE - Adenosine deaminase sequence
  REGION 168..199: note = MISC_FEATURE - Linker sequence
  REGION 200..365: note = MISC_FEATURE - Adenosine deaminase sequence
  REGION 366..397: note = MISC_FEATURE - Linker sequence
  REGION 398..1764: note = MISC_FEATURE - Sequence derived from Cas9
  REGION 1765..1786: note = MISC_FEATURE - Bipartite nuclear localization sequence
MSEVEFSHEYWMRHALTLAKRAWDEREVPVGAVLVHNNRVIGEGWNRPIGRHDPTAHAEIMALRQGGLVMQNYRLIDATLYVTLEPCVMCAGAMIHSRIGRVVFGARDAKTGAAGSLMDVLHHPGMNHRVEITEGILADECAALLSDFFRMRRQEIKAQKKAQSSTDSGGSSGGSSGSETPGTSESATPESSGGSSGGSSEVEFSHEYWMRHALTLAKRARDEREVPVGAVLVLNNRVIGEGWNRAIGLHDPTAHAEIMALRQGGLVMQNYRLYDATLYVTFEPCVMCAGAMIHSRIGRVVFGVRNAKTGAAGSLMDVLHHPGMNHRVEITEGILADECAALLCRFFRMPRRVFNAQKKAQSSTDSGGSSGGSSGSETPGTSESATPESSGGSSGGSDKKYSIGLAIGTNSVGWAVITDEYKVPSKKFKVLGNTDRHSIKKNLIGALLFDSGETAEATRLKRTARRRYTRRKNRICYLQEIFSNEMAKVDDSFFHRLEESFLVEEDKKHERHPIFGNIVDEVAYHEKYPTIYHLRKKLVDSTDKADLRLIYLALAHMIKFRGHFLIEGDLNPDNSDVDKLFIQLVQTYNQLFEENPINASGVDAKAILSARLSKSRRLENLIAQLPGEKKNGLFGNLIALSLGLTPNFKSNFDLAEDAKLQLSKDTYDDDLDNLLAQIGDQYADLFLAAKNLSDAILLSDILRVNTEITKAPLSASMIKRYDEHHQDLTLLKALVRQQLPEKYKEIFFDQSKNGYAGYIDGGASQEEFYKFIKPILEKMDGTEELLVKLNREDLLRKQRTFDNGSIPHQIHLGELHAILRRQEDFYPFLKDNREKIEKILTFRIPYYVGPLARGNSRFAWMTRKSEETITPWNFEEVVDKGASAQSFIERMTNFDKNLPNEKVLPKHSLLYEYFTVYNELTKVKYVTEGMRKPAFLSGEQKKAIVDLLFKTNRKVTVKQLKEDYFKKIECFDSVEISGVEDRFNASLGTYHDLLKIIKDKDFLDNEENEDILEDIVLTLTLFEDREMIEERLKTYAHLFDDKVMKQLKRRRYTGWGRLSRKLINGIRDKQSGKTILDFLKSDGFANRNFMQLIHDDSLTFKEDIQKAQVSGQGDSLHEHIANLAGSPAIKKGILQTVKVVDELVKVMGRHKPENIVIEMARENQTTQKGQKNSRERMKRIEEGIKELGSQILKEHPVENTQLQNEKLYLYYLQNGRDMYVDQELDINRLSDYDVDHIVPQSFLKDDSIDNKVLTRSDKNRGKSDNVPSEEVVKKMKNYWRQLLNAKLITQRKFDNLTKAERGGLSELDKAGFIKRQLVETRQITKHVAQILDSRMNTKYDENDKLIREVKVITLKSKLVSDFRKDFQFYKVREINNYHHAHDAYLNAVVGTALIKKYPKLESEFVYGDYKVYDVRKMIAKSEQEIGKATAKYFFYSNIMNFFKTEITLANGEIRKRPLIETNGETGEIVWDKGRDFATVRKVLSMPQVNIVKKTEVQTGGFSKESILPKRNSDKLIARKKDWDPKKYGGFDSPTVAYSVLVVAKVEKGKSKKLKSVKELLGITIMERSSFEKNPIDFLEAKGYKEVKKDLIIKLPKYSLFELENGRKRMLASAGELQKGNELALPSKYVNFLYLASHYEKLKGSPEDNEQKQLFVEQHKHYLDEIIEQISEFSKRVILADANLDKVLSAYNKHRDKPIREQAENIIHLFTLTNLGAPAAFKYFDTTIDRKRYTSTKEVLDATLIHQSITGLYETRIDLSQLGGDEGADKRTADGSEFESPKKKRKV

SEQ ID NO: 337 - protein, 1588 aa, synthetic construct
  REGION 1..1588: note = ABE8.17-m polypeptide sequence
  REGION 1..167: note = MISC_FEATURE - Adenosine deaminase sequence
  REGION 168..199: note = MISC_FEATURE - Linker sequence
  REGION 200..1566: note = MISC_FEATURE - Sequence derived from Cas9
  REGION 1567..1588: note = MISC_FEATURE - Bipartite nuclear localization sequence
MSEVEFSHEYWMRHALTLAKRARDEREVPVGAVLVLNNRVIGEGWNRAIGLHDPTAHAEIMALRQGGLVMQNYRLIDATLYSTFEPCVMCAGAMIHSRIGRVVFGVRNAKTGAAGSLMDVLHYPGMNHRVEITEGILADECAALLCYFFRMPRRVFNAQKKAQSSTDSGGSSGGSSGSETPGTSESATPESSGGSSGGSDKKYSIGLAIGTNSVGWAVITDEYKVPSKKFKVLGNTDRHSIKKNLIGALLFDSGETAEATRLKRTARRRYTRRKNRICYLQEIFSNEMAKVDDSFFHRLEESFLVEEDKKHERHPIFGNIVDEVAYHEKYPTIYHLRKKLVDSTDKADLRLIYLALAHMIKFRGHFLIEGDLNPDNSDVDKLFIQLVQTYNQLFEENPINASGVDAKAILSARLSKSRRLENLIAQLPGEKKNGLFGNLIALSLGLTPNFKSNFDLAEDAKLQLSKDTYDDDLDNLLAQIGDQYADLFLAAKNLSDAILLSDILRVNTEITKAPLSASMIKRYDEHHQDLTLLKALVRQQLPEKYKEIFFDQSKNGYAGYIDGGASQEEFYKFIKPILEKMDGTEELLVKLNREDLLRKQRTFDNGSIPHQIHLGELHAILRRQEDFYPFLKDNREKIEKILTFRIPYYVGPLARGNSRFAWMTRKSEETITPWNFEEVVDKGASAQSFIERMTNFDKNLPNEKVLPKHSLLYEYFTVYNELTKVKYVTEGMRKPAFLSGEQKKAIVDLLFKTNRKVTVKQLKEDYFKKIECFDSVEISGVEDRFNASLGTYHDLLKIIKDKDFLDNEENEDILEDIVLTLTLFEDREMIEERLKTYAHLFDDKVMKQLKRRRYTGWGRLSRKLINGIRDKQSGKTILDFLKSDGFANRNFMQLIHDDSLTFKEDIQKAQVSGQGDSLHEHIANLAGSPAIKKGILQTVKVVDELVKVMGRHKPENIVIEMARENQTTQKGQKNSRERMKRIEEGIKELGSQILKEHPVENTQLQNEKLYLYYLQNGRDMYVDQELDINRLSDYDVDHIVPQSFLKDDSIDNKVLTRSDKNRGKSDNVPSEEVVKKMKNYWRQLLNAKLITQRKFDNLTKAERGGLSELDKAGFIKRQLVETRQITKHVAQILDSRMNTKYDENDKLIREVKVITLKSKLVSDFRKDFQFYKVREINNYHHAHDAYLNAVVGTALIKKYPKLESEFVYGDYKVYDVRKMIAKSEQEIGKATAKYFFYSNIMNFFKTEITLANGEIRKRPLIETNGETGEIVWDKGRDFATVRKVLSMPQVNIVKKTEVQTGGFSKESILPKRNSDKLIARKKDWDPKKYGGFDSPTVAYSVLVVAKVEKGKSKKLKSVKELLGITIMERSSFEKNPIDFLEAKGYKEVKKDLIIKLPKYSLFELENGRKRMLASAGELQKGNELALPSKYVNFLYLASHYEKLKGSPEDNEQKQLFVEQHKHYLDEIIEQISEFSKRVILADANLDKVLSAYNKHRDKPIREQAENIIHLFTLTNLGAPAAFKYFDTTIDRKRYTSTKEVLDATLIHQSITGLYETRIDLSQLGGDEGADKRTADGSEFESPKKKRKV

SEQ ID NO: 338 - protein, 1786 aa, synthetic construct
  REGION 1..1786: note = ABE8.17-d polypeptide sequence
  REGION 1..167: note = MISC_FEATURE - Adenosine deaminase sequence
  REGION 168..199: note = MISC_FEATURE - Linker sequence
  REGION 200..365: note = MISC_FEATURE - Adenosine deaminase sequence
  REGION 366..397: note = MISC_FEATURE - Linker sequence
  REGION 398..1764: note = MISC_FEATURE - Sequence derived from Cas9
  REGION 1765..1786: note = MISC_FEATURE - Bipartite nuclear localization sequence
MSEVEFSHEYWMRHALTLAKRAWDEREVPVGAVLVHNNRVIGEGWNRPIGRHDPTAHAEIMALRQGGLVMQNYRLIDATLYVTLEPCVMCAGAMIHSRIGRVVFGARDAKTGAAGSLMDVLHHPGMNHRVEITEGILADECAALLSDFFRMRRQEIKAQKKAQSSTDSGGSSGGSSGSETPGTSESATPESSGGSSGGSSEVEFSHEYWMRHALTLAKRARDEREVPVGAVLVLNNRVIGEGWNRAIGLHDPTAHAEIMALRQGGLVMQNYRLIDATLYSTFEPCVMCAGAMIHSRIGRVVFGVRNAKTGAAGSLMDVLHYPGMNHRVEITEGILADECAALLCYFFRMPRRVFNAQKKAQSSTDSGGSSGGSSGSETPGTSESATPESSGGSSGGSDKKYSIGLAIGTNSVGWAVITDEYKVPSKKFKVLGNTDRHSIKKNLIGALLFDSGETAEATRLKRTARRRYTRRKNRICYLQEIFSNEMAKVDDSFFHRLEESFLVEEDKKHERHPIFGNIVDEVAYHEKYPTIYHLRKKLVDSTDKADLRLIYLALAHMIKFRGHFLIEGDLNPDNSDVDKLFIQLVQTYNQLFEENPINASGVDAKAILSARLSKSRRLENLIAQLPGEKKNGLFGNLIALSLGLTPNFKSNFDLAEDAKLQLSKDTYDDDLDNLLAQIGDQYADLFLAAKNLSDAILLSDILRVNTEITKAPLSASMIKRYDEHHQDLTLLKALVRQQLPEKYKEIFFDQSKNGYAGYIDGGASQEEFYKFIKPILEKMDGTEELLVKLNREDLLRKQRTFDNGSIPHQIHLGELHAILRRQEDFYPFLKDNREKIEKILTFRIPYYVGPLARGNSRFAWMTRKSEETITPWNFEEVVDKGASAQSFIERMTNFDKNLPNEKVLPKHSLLYEYFTVYNELTKVKYVTEGMRKPAFLSGEQKKAIVDLLFKTNRKVTVKQLKEDYFKKIECFDSVEISGVEDRFNASLGTYHDLLKIIKDKDFLDNEENEDILEDIVLTLTLFEDREMIEERLKTYAHLFDDKVMKQLKRRRYTGWGRLSRKLINGIRDKQSGKTILDFLKSDGFANRNFMQLIHDDSLTFKEDIQKAQVSGQGDSLHEHIANLAGSPAIKKGILQTVKVVDELVKVMGRHKPENIVIEMARENQTTQKGQKNSRERMKRIEEGIKELGSQILKEHPVENTQLQNEKLYLYYLQNGRDMYVDQELDINRLSDYDVDHIVPQSFLKDDSIDNKVLTRSDKNRGKSDNVPSEEVVKKMKNYWRQLLNAKLITQRKFDNLTKAERGGLSELDKAGFIKRQLVETRQITKHVAQILDSRMNTKYDENDKLIREVKVITLKSKLVSDFRKDFQFYKVREINNYHHAHDAYLNAVVGTALIKKYPKLESEFVYGDYKVYDVRKMIAKSEQEIGKATAKYFFYSNIMNFFKTEITLANGEIRKRPLIETNGETGEIVWDKGRDFATVRKVLSMPQVNIVKKTEVQTGGFSKESILPKRNSDKLIARKKDWDPKKYGGFDSPTVAYSVLVVAKVEKGKSKKLKSVKELLGITIMERSSFEKNPIDFLEAKGYKEVKKDLIIKLPKYSLFELENGRKRMLASAGELQKGNELALPSKYVNFLYLASHYEKLKGSPEDNEQKQLFVEQHKHYLDEIIEQISEFSKRVILADANLDKVLSAYNKHRDKPIREQAENIIHLFTLTNLGAPAAFKYFDTTIDRKRYTSTKEVLDATLIHQSITGLYETRIDLSQLGGDEGADKRTADGSEFESPKKKRKV

SEQ ID NO: 339 - protein, 1588 aa, synthetic construct
  REGION 1..1588: note = ABE8.20-m polypeptide sequence
  REGION 1..167: note = MISC_FEATURE - Adenosine deaminase sequence
  REGION 168..199: note = MISC_FEATURE - Linker sequence
  REGION 200..1566: note = MISC_FEATURE - Sequence derived from Cas9
  REGION 1567..1588: note = MISC_FEATURE - Bipartite nuclear localization sequence
MSEVEFSHEYWMRHALTLAKRARDEREVPVGAVLVLNNRVIGEGWNRAIGLHDPTAHAEIMALRQGGLVMQNYRLYDATLYSTFEPCVMCAGAMIHSRIGRVVFGVRNAKTGAAGSLMDVLHHPGMNHRVEITEGILADECAALLCRFFRMPRRVFNAQKKAQSSTDSGGSSGGSSGSETPGTSESATPESSGGSSGGSDKKYSIGLAIGTNSVGWAVITDEYKVPSKKFKVLGNTDRHSIKKNLIGALLFDSGETAEATRLKRTARRRYTRRKNRICYLQEIFSNEMAKVDDSFFHRLEESFLVEEDKKHERHPIFGNIVDEVAYHEKYPTIYHLRKKLVDSTDKADLRLIYLALAHMIKFRGHFLIEGDLNPDNSDVDKLFIQLVQTYNQLFEENPINASGVDAKAILSARLSKSRRLENLIAQLPGEKKNGLFGNLIALSLGLTPNFKSNFDLAEDAKLQLSKDTYDDDLDNLLAQIGDQYADLFLAAKNLSDAILLSDILRVNTEITKAPLSASMIKRYDEHHQDLTLLKALVRQQLPEKYKEIFFDQSKNGYAGYIDGGASQEEFYKFIKPILEKMDGTEELLVKLNREDLLRKQRTFDNGSIPHQIHLGELHAILRRQEDFYPFLKDNREKIEKILTFRIPYYVGPLARGNSRFAWMTRKSEETITPWNFEEVVDKGASAQSFIERMTNFDKNLPNEKVLPKHSLLYEYFTVYNELTKVKYVTEGMRKPAFLSGEQKKAIVDLLFKTNRKVTVKQLKEDYFKKIECFDSVEISGVEDRFNASLGTYHDLLKIIKDKDFLDNEENEDILEDIVLTLTLFEDREMIEERLKTYAHLFDDKVMKQLKRRRYTGWGRLSRKLINGIRDKQSGKTILDFLKSDGFANRNFMQLIHDDSLTFKEDIQKAQVSGQGDSLHEHIANLAGSPAIKKGILQTVKVVDELVKVMGRHKPENIVIEMARENQTTQKGQKNSRERMKRIEEGIKELGSQILKEHPVENTQLQNEKLYLYYLQNGRDMYVDQELDINRLSDYDVDHIVPQSFLKDDSIDNKVLTRSDKNRGKSDNVPSEEVVKKMKNYWRQLLNAKLITQRKFDNLTKAERGGLSELDKAGFIKRQLVETRQITKHVAQILDSRMNTKYDENDKLIREVKVITLKSKLVSDFRKDFQFYKVREINNYHHAHDAYLNAVVGTALIKKYPKLESEFVYGDYKVYDVRKMIAKSEQEIGKATAKYFFYSNIMNFFKTEITLANGEIRKRPLIETNGETGEIVWDKGRDFATVRKVLSMPQVNIVKKTEVQTGGFSKESILPKRNSDKLIARKKDWDPKKYGGFDSPTVAYSVLVVAKVEKGKSKKLKSVKELLGITIMERSSFEKNPIDFLEAKGYKEVKKDLIIKLPKYSLFELENGRKRMLASAGELQKGNELALPSKYVNFLYLASHYEKLKGSPEDNEQKQLFVEQHKHYLDEIIEQISEFSKRVILADANLDKVLSAYNKHRDKPIREQAENIIHLFTLTNLGAPAAFKYFDTTIDRKRYTSTKEVLDATLIHQSITGLYETRIDLSQLGGDEGADKRTADGSEFESPKKKRKV

SEQ ID NO: 340 - protein, 1786 aa, synthetic construct
  REGION 1..1786: note = ABE8.20-d polypeptide sequence
  REGION 1..167: note = MISC_FEATURE - Adenosine deaminase sequence
  REGION 168..199: note = MISC_FEATURE - Linker sequence
  REGION 200..365: note = MISC_FEATURE - Adenosine deaminase sequence
  REGION 366..397: note = MISC_FEATURE - Linker sequence
  REGION 398..1764: note = MISC_FEATURE - Sequence derived from Cas9
  REGION 1765..1786: note = MISC_FEATURE - Bipartite nuclear localization sequence
MSEVEFSHEYWMRHALTLAKRAWDEREVPVGAVLVHNNRVIGEGWNRPIGRHDPTAHAEIMALRQGGLVMQNYRLIDATLYVTLEPCVMCAGAMIHSRIGRVVFGARDAKTGAAGSLMDVLHHPGMNHRVEITEGILADECAALLSDFFRMRRQEIKAQKKAQSSTDSGGSSGGSSGSETPGTSESATPESSGGSSGGSSEVEFSHEYWMRHALTLAKRARDEREVPVGAVLVLNNRVIGEGWNRAIGLHDPTAHAEIMALRQGGLVMQNYRLYDATLYSTFEPCVMCAGAMIHSRIGRVVFGVRNAKTGAAGSLMDVLHHPGMNHRVEITEGILADECAALLCRFFRMPRRVFNAQKKAQSSTDSGGSSGGSSGSETPGTSESATPESSGGSSGGSDKKYSIGLAIGTNSVGWAVITDEYKVPSKKFKVLGNTDRHSIKKNLIGALLFDSGETAEATRLKRTARRRYTRRKNRICYLQEIFSNEMAKVDDSFFHRLEESFLVEEDKKHERHPIFGNIVDEVAYHEKYPTIYHLRKKLVDSTDKADLRLIYLALAHMIKFRGHFLIEGDLNPDNSDVDKLFIQLVQTYNQLFEENPINASGVDAKAILSARLSKSRRLENLIAQLPGEKKNGLFGNLIALSLGLTPNFKSNFDLAEDAKLQLSKDTYDDDLDNLLAQIGDQYADLFLAAKNLSDAILLSDILRVNTEITKAPLSASMIKRYDEHHQDLTLLKALVRQQLPEKYKEIFFDQSKNGYAGYIDGGASQEEFYKFIKPILEKMDGTEELLVKLNREDLLRKQRTFDNGSIPHQIHLGELHAILRRQEDFYPFLKDNREKIEKILTFRIPYYVGPLARGNSRFAWMTRKSEETITPWNFEEVVDKGASAQSFIERMTNFDKNLPNEKVLPKHSLLYEYFTVYNELTKVKYVTEGMRKPAFLSGEQKKAIVDLLFKTNRKVTVKQLKEDYFKKIECFDSVEISGVEDRFNASLGTYHDLLKIIKDKDFLDNEENEDILEDIVLTLTLFEDREMIEERLKTYAHLFDDKVMKQLKRRRYTGWGRLSRKLINGIRDKQSGKTILDFLKSDGFANRNFMQLIHDDSLTFKEDIQKAQVSGQGDSLHEHIANLAGSPAIKKGILQTVKVVDELVKVMGRHKPENIVIEMARENQTTQKGQKNSRERMKRIEEGIKELGSQILKEHPVENTQLQNEKLYLYYLQNGRDMYVDQELDINRLSDYDVDHIVPQSFLKDDSIDNKVLTRSDKNRGKSDNVPSEEVVKKMKNYWRQLLNAKLITQRKFDNLTKAERGGLSELDKAGFIKRQLVETRQITKHVAQILDSRMNTKYDENDKLIREVKVITLKSKLVSDFRKDFQFYKVREINNYHHAHDAYLNAVVGTALIKKYPKLESEFVYGDYKVYDVRKMIAKSEQEIGKATAKYFFYSNIMNFFKTEITLANGEIRKRPLIETNGETGEIVWDKGRDFATVRKVLSMPQVNIVKKTEVQTGGFSKESILPKRNSDKLIARKKDWDPKKYGGFDSPTVAYSVLVVAKVEKGKSKKLKSVKELLGITIMERSSFEKNPIDFLEAKGYKEVKKDLIIKLPKYSLFELENGRKRMLASAGELQKGNELALPSKYVNFLYLASHYEKLKGSPEDNEQKQLFVEQHKHYLDEIIEQISEFSKRVILADANLDKVLSAYNKHRDKPIREQAENIIHLFTLTNLGAPAAFKYFDTTIDRKRYTSTKEVLDATLIHQSITGLYETRIDLSQLGGDEGADKRTADGSEFESPKKKRKV

SEQ ID NO: 341 - protein, 1588 aa, synthetic construct
  REGION 1..1588: note = 01. monoABE8.1_bpNLS + Y147T polypeptide sequence
MSEVEFSHEYWMRHALTLAKRARDEREVPVGAVLVLNNRVIGEGWNRAIGLHDPTAHAEIMALRQGGLVMQNYRLIDATLYVTFEPCVMCAGAMIHSRIGRVVFGVRNAKTGAAGSLMDVLHYPGMNHRVEITEGILADECAALLCTFFRMPRQVFNAQKKAQSSTDSGGSSGGSSGSETPGTSESATPESSGGSSGGSDKKYSIGLAIGTNSVGWAVITDEYKVPSKKFKVLGNTDRHSIKKNLIGALLFDSGETAEATRLKRTARRRYTRRKNRICYLQEIFSNEMAKVDDSFFHRLEESFLVEEDKKHERHPIFGNIVDEVAYHEKYPTIYHLRKKLVDSTDKADLRLIYLALAHMIKFRGHFLIEGDLNPDNSDVDKLFIQLVQTYNQLFEENPINASGVDAKAILSARLSKSRRLENLIAQLPGEKKNGLFGNLIALSLGLTPNFKSNFDLAEDAKLQLSKDTYDDDLDNLLAQIGDQYADLFLAAKNLSDAILLSDILRVNTEITKAPLSASMIKRYDEHHQDLTLLKALVRQQLPEKYKEIFFDQSKNGYAGYIDGGASQEEFYKFIKPILEKMDGTEELLVKLNREDLLRKQRTFDNGSIPHQIHLGELHAILRRQEDFYPFLKDNREKIEKILTFRIPYYVGPLARGNSRFAWMTRKSEETITPWNFEEVVDKGASAQSFIERMTNFDKNLPNEKVLPKHSLLYEYFTVYNELTKVKYVTEGMRKPAFLSGEQKKAIVDLLFKTNRKVTVKQLKEDYFKKIECFDSVEISGVEDRFNASLGTYHDLLKIIKDKDFLDNEENEDILEDIVLTLTLFEDREMIEERLKTYAHLFDDKVMKQLKRRRYTGWGRLSRKLINGIRDKQSGKTILDFLKSDGFANRNFMQLIHDDSLTFKEDIQKAQVSGQGDSLHEHIANLAGSPAIKKGILQTVKVVDELVKVMGRHKPENIVIEMARENQTTQKGQKNSRERMKRIEEGIKELGSQILKEHPVENTQLQNEKLYLYYLQNGRDMYVDQELDINRLSDYDVDHIVPQSFLKDDSIDNKVLTRSDKNRGKSDNVPSEEVVKKMKNYWRQLLNAKLITQRKFDNLTKAERGGLSELDKAGFIKRQLVETRQITKHVAQILDSRMNTKYDENDKLIREVKVITLKSKLVSDFRKDFQFYKVREINNYHHAHDAYLNAVVGTALIKKYPKLESEFVYGDYKVYDVRKMIAKSEQEIGKATAKYFFYSNIMNFFKTEITLANGEIRKRPLIETNGETGEIVWDKGRDFATVRKVLSMPQVNIVKKTEVQTGGFSKESILPKRNSDKLIARKKDWDPKKYGGFVSPTVAYSVLVVAKVEKGKSKKLKSVKELLGITIMERSSFEKNPIDFLEAKGYKEVKKDLIIKLPKYSLFELENGRKRMLASARELQKGNELALPSKYVNFLYLASHYEKLKGSPEDNEQKQLFVEQHKHYLDEIIEQISEFSKRVILADANLDKVLSAYNKHRDKPIREQAENIIHLFTLTNLGAPAAFKYFDTTIDRKQYRSTKEVLDATLIHQSITGLYETRIDLSQLGGDEGADKRTADGSEFESPKKKRKV

SEQ ID NO: 342 - protein, 1588 aa, synthetic construct
  REGION 1..1588: note = 02. monoABE8.1_bpNLS + Y147R polypeptide sequence
MSEVEFSHEYWMRHALTLAKRARDEREVPVGAVLVLNNRVIGEGWNRAIGLHDPTAHAEIMALRQGGLVMQNYRLIDATLYVTFEPCVMCAGAMIHSRIGRVVFGVRNAKTGAAGSLMDVLHYPGMNHRVEITEGILADECAALLCRFFRMPRQVFNAQKKAQSSTDSGGSSGGSSGSETPGTSESATPESSGGSSGGSDKKYSIGLAIGTNSVGWAVITDEYKVPSKKFKVLGNTDRHSIKKNLIGALLFDSGETAEATRLKRTARRRYTRRKNRICYLQEIFSNEMAKVDDSFFHRLEESFLVEEDKKHERHPIFGNIVDEVAYHEKYPTIYHLRKKLVDSTDKADLRLIYLALAHMIKFRGHFLIEGDLNPDNSDVDKLFIQLVQTYNQLFEENPINASGVDAKAILSARLSKSRRLENLIAQLPGEKKNGLFGNLIALSLGLTPNFKSNFDLAEDAKLQLSKDTYDDDLDNLLAQIGDQYADLFLAAKNLSDAILLSDILRVNTEITKAPLSASMIKRYDEHHQDLTLLKALVRQQLPEKYKEIFFDQSKNGYAGYIDGGASQEEFYKFIKPILEKMDGTEELLVKLNREDLLRKQRTFDNGSIPHQIHLGELHAILRRQEDFYPFLKDNREKIEKILTFRIPYYVGPLARGNSRFAWMTRKSEETITPWNFEEVVDKGASAQSFIERMTNFDKNLPNEKVLPKHSLLYEYFTVYNELTKVKYVTEGMRKPAFLSGEQKKAIVDLLFKTNRKVTVKQLKEDYFKKIECFDSVEISGVEDRFNASLGTYHDLLKIIKDKDFLDNEENEDILEDIVLTLTLFEDREMIEERLKTYAHLFDDKVMKQLKRRRYTGWGRLSRKLINGIRDKQSGKTILDFLKSDGFANRNFMQLIHDDSLTFKEDIQKAQVSGQGDSLHEHIANLAGSPAIKKGILQTVKVVDELVKVMGRHKPENIVIEMARENQTTQKGQKNSRERMKRIEEGIKELGSQILKEHPVENTQLQNEKLYLYYLQNGRDMYVDQELDINRLSDYDVDHIVPQSFLKDDSIDNKVLTRSDKNRGKSDNVPSEEVVKKMKNYWRQLLNAKLITQRKFDNLTKAERGGLSELDKAGFIKRQLVETRQITKHVAQILDSRMNTKYDENDKLIREVKVITLKSKLVSDFRKDFQFYKVREINNYHHAHDAYLNAVVGTALIKKYPKLESEFVYGDYKVYDVRKMIAKSEQEIGKATAKYFFYSNIMNFFKTEITLANGEIRKRPLIETNGETGEIVWDKGRDFATVRKVLSMPQVNIVKKTEVQTGGFSKESILPKRNSDKLIARKKDWDPKKYGGFVSPTVAYSVLVVAKVEKGKSKKLKSVKELLGITIMERSSFEKNPIDFLEAKGYKEVKKDLIIKLPKYSLFELENGRKRMLASARELQKGNELALPSKYVNFLYLASHYEKLKGSPEDNEQKQLFVEQHKHYLDEIIEQISEFSKRVILADANLDKVLSAYNKHRDKPIREQAENIIHLFTLTNLGAPAAFKYFDTTIDRKQYRSTKEVLDATLIHQSITGLYETRIDLSQLGGDEGADKRTADGSEFESPKKKRKV

SEQ ID NO: 343 - protein, 1588 aa, synthetic construct
  REGION 1..1588: note = 03. monoABE8.1_bpNLS + Q154S polypeptide sequence
MSEVEFSHEYWMRHALTLAKRARDEREVPVGAVLVLNNRVIGEGWNRAIGLHDPTAHAEIMALRQGGLVMQNYRLIDATLYVTFEPCVMCAGAMIHSRIGRVVFGVRNAKTGAAGSLMDVLHYPGMNHRVEITEGILADECAALLCYFFRMPRSVFNAQKKAQSSTDSGGSSGGSSGSETPGTSESATPESSGGSSGGSDKKYSIGLAIGTNSVGWAVITDEYKVPSKKFKVLGNTDRHSIKKNLIGALLFDSGETAEATRLKRTARRRYTRRKNRICYLQEIFSNEMAKVDDSFFHRLEESFLVEEDKKHERHPIFGNIVDEVAYHEKYPTIYHLRKKLVDSTDKADLRLIYLALAHMIKFRGHFLIEGDLNPDNSDVDKLFIQLVQTYNQLFEENPINASGVDAKAILSARLSKSRRLENLIAQLPGEKKNGLFGNLIALSLGLTPNFKSNFDLAEDAKLQLSKDTYDDDLDNLLAQIGDQYADLFLAAKNLSDAILLSDILRVNTEITKAPLSASMIKRYDEHHQDLTLLKALVRQQLPEKYKEIFFDQSKNGYAGYIDGGASQEEFYKFIKPILEKMDGTEELLVKLNREDLLRKQRTFDNGSIPHQIHLGELHAILRRQEDFYPFLKDNREKIEKILTFRIPYYVGPLARGNSRFAWMTRKSEETITPWNFEEVVDKGASAQSFIERMTNFDKNLPNEKVLPKHSLLYEYFTVYNELTKVKYVTEGMRKPAFLSGEQKKAIVDLLFKTNRKVTVKQLKEDYFKKIECFDSVEISGVEDRFNASLGTYHDLLKIIKDKDFLDNEENEDILEDIVLTLTLFEDREMIEERLKTYAHLFDDKVMKQLKRRRYTGWGRLSRKLINGIRDKQSGKTILDFLKSDGFANRNFMQLIHDDSLTFKEDIQKAQVSGQGDSLHEHIANLAGSPAIKKGILQTVKVVDELVKVMGRHKPENIVIEMARENQTTQKGQKNSRERMKRIEEGIKELGSQILKEHPVENTQLQNEKLYLYYLQNGRDMYVDQELDINRLSDYDVDHIVPQSFLKDDSIDNKVLTRSDKNRGKSDNVPSEEVVKKMKNYWRQLLNAKLITQRKFDNLTKAERGGLSELDKAGFIKRQLVETRQITKHVAQILDSRMNTKYDENDKLIREVKVITLKSKLVSDFRKDFQFYKVREINNYHHAHDAYLNAVVGTALIKKYPKLESEFVYGDYKVYDVRKMIAKSEQEIGKATAKYFFYSNIMNFFKTEITLANGEIRKRPLIETNGETGEIVWDKGRDFATVRKVLSMPQVNIVKKTEVQTGGFSKESILPKRNSDKLIARKKDWDPKKYGGFVSPTVAYSVLVVAKVEKGKSKKLKSVKELLGITIMERSSFEKNPIDFLEAKGYKEVKKDLIIKLPKYSLFELENGRKRMLASARELQKGNELALPSKYVNFLYLASHYEKLKGSPEDNEQKQLFVEQHKHYLDEIIEQISEFSKRVILADANLDKVLSAYNKHRDKPIREQAENIIHLFTLTNLGAPAAFKYFDTTIDRKQYRSTKEVLDATLIHQSITGLYETRIDLSQLGGDEGADKRTADGSEFESPKKKRKV

SEQ ID NO: 344 - protein, 1588 aa, synthetic construct
  REGION 1..1588: note = 04. monoABE8.1_bpNLS + Y123H polypeptide sequence
MSEVEFSHEYWMRHALTLAKRARDEREVPVGAVLVLNNRVIGEGWNRAIGLHDPTAHAEIMALRQGGLVMQNYRLIDATLYVTFEPCVMCAGAMIHSRIGRVVFGVRNAKTGAAGSLMDVLHHPGMNHRVEITEGILADECAALLCYFFRMPRQVFNAQKKAQSSTDSGGSSGGSSGSETPGTSESATPESSGGSSGGSDKKYSIGLAIGTNSVGWAVITDEYKVPSKKFKVLGNTDRHSIKKNLIGALLFDSGETAEATRLKRTARRRYTRRKNRICYLQEIFSNEMAKVDDSFFHRLEESFLVEEDKKHERHPIFGNIVDEVAYHEKYPTIYHLRKKLVDSTDKADLRLIYLALAHMIKFRGHFLIEGDLNPDNSDVDKLFIQLVQTYNQLFEENPINASGVDAKAILSARLSKSRRLENLIAQLPGEKKNGLFGNLIALSLGLTPNFKSNFDLAEDAKLQLSKDTYDDDLDNLLAQIGDQYADLFLAAKNLSDAILLSDILRVNTEITKAPLSASMIKRYDEHHQDLTLLKALVRQQLPEKYKEIFFDQSKNGYAGYIDGGASQEEFYKFIKPILEKMDGTEELLVKLNREDLLRKQRTFDNGSIPHQIHLGELHAILRRQEDFYPFLKDNREKIEKILTFRIPYYVGPLARGNSRFAWMTRKSEETITPWNFEEVVDKGASAQSFIERMTNFDKNLPNEKVLPKHSLLYEYFTVYNELTKVKYVTEGMRKPAFLSGEQKKAIVDLLFKTNRKVTVKQLKEDYFKKIECFDSVEISGVEDRFNASLGTYHDLLKIIKDKDFLDNEENEDILEDIVLTLTLFEDREMIEERLKTYAHLFDDKVMKQLKRRRYTGWGRLSRKLINGIRDKQSGKTILDFLKSDGFANRNFMQLIHDDSLTFKEDIQKAQVSGQGDSLHEHIANLAGSPAIKKGILQTVKVVDELVKVMGRHKPENIVIEMARENQTTQKGQKNSRERMKRIEEGIKELGSQILKEHPVENTQLQNEKLYLYYLQNGRDMYVDQELDINRLSDYDVDHIVPQSFLKDDSIDNKVLTRSDKNRGKSDNVPSEEVVKKMKNYWRQLLNAKLITQRKFDNLTKAERGGLSELDKAGFIKRQLVETRQITKHVAQILDSRMNTKYDENDKLIREVKVITLKSKLVSDFRKDFQFYKVREINNYHHAHDAYLNAVVGTALIKKYPKLESEFVYGDYKVYDVRKMIAKSEQEIGKATAKYFFYSNIMNFFKTEITLANGEIRKRPLIETNGETGEIVWDKGRDFATVRKVLSMPQVNIVKKTEVQTGGFSKESILPKRNSDKLIARKKDWDPKKYGGFVSPTVAYSVLVVAKVEKGKSKKLKSVKELLGITIMERSSFEKNPIDFLEAKGYKEVKKDLIIKLPKYSLFELENGRKRMLASARELQKGNELALPSKYVNFLYLASHYEKLKGSPEDNEQKQLFVEQHKHYLDEIIEQISEFSKRVILADANLDKVLSAYNKHRDKPIREQAENIIHLFTLTNLGAPAAFKYFDTTIDRKQYRSTKEVLDATLIHQSITGLYETRIDLSQLGGDEGADKRTADGSEFESPKKKRKV

SEQ ID NO: 345 - protein, 1588 aa, synthetic construct
  REGION 1..1588: note = 05. monoABE8.1_bpNLS + V82S polypeptide sequence
MSEVEFSHEYWMRHALTLAKRARDEREVPVGAVLVLNNRVIGEGWNRAIGLHDPTAHAEIMALRQGGLVMQNYRLIDATLYSTFEPCVMCAGAMIHSRIGRVVFGVRNAKTGAAGSLMDVLHYPGMNHRVEITEGILADECAALLCYFFRMPRQVFNAQKKAQSSTDSGGSSGGSSGSETPGTSESATPESSGGSSGGSDKKYSIGLAIGTNSVGWAVITDEYKVPSKKFKVLGNTDRHSIKKNLIGALLFDSGETAEATRLKRTARRRYTRRKNRICYLQEIFSNEMAKVDDSFFHRLEESFLVEEDKKHERHPIFGNIVDEVAYHEKYPTIYHLRKKLVDSTDKADLRLIYLALAHMIKFRGHFLIEGDLNPDNSDVDKLFIQLVQTYNQLFEENPINASGVDAKAILSARLSKSRRLENLIAQLPGEKKNGLFGNLIALSLGLTPNFKSNFDLAEDAKLQLSKDTYDDDLDNLLAQIGDQYADLFLAAKNLSDAILLSDILRVNTEITKAPLSASMIKRYDEHHQDLTLLKALVRQQLPEKYKEIFFDQSKNGYAGYIDGGASQEEFYKFIKPILEKMDGTEELLVKLNREDLLRKQRTFDNGSIPHQIHLGELHAILRRQEDFYPFLKDNREKIEKILTFRIPYYVGPLARGNSRFAWMTRKSEETITPWNFEEVVDKGASAQSFIERMTNFDKNLPNEKVLPKHSLLYEYFTVYNELTKVKYVTEGMRKPAFLSGEQKKAIVDLLFKTNRKVTVKQLKEDYFKKIECFDSVEISGVEDRFNASLGTYHDLLKIIKDKDFLDNEENEDILEDIVLTLTLFEDREMIEERLKTYAHLFDDKVMKQLKRRRYTGWGRLSRKLINGIRDKQSGKTILDFLKSDGFANRNFMQLIHDDSLTFKEDIQKAQVSGQGDSLHEHIANLAGSPAIKKGILQTVKVVDELVKVMGRHKPENIVIEMARENQTTQKGQKNSRERMKRIEEGIKELGSQILKEHPVENTQLQNEKLYLYYLQNGRDMYVDQELDINRLSDYDVDHIVPQSFLKDDSIDNKVLTRSDKNRGKSDNVPSEEVVKKMKNYWRQLLNAKLITQRKFDNLTKAERGGLSELDKAGFIKRQLVETRQITKHVAQILDSRMNTKYDENDKLIREVKVITLKSKLVSDFRKDFQFYKVREINNYHHAHDAYLNAVVGTALIKKYPKLESEFVYGDYKVYDVRKMIAKSEQEIGKATAKYFFYSNIMNFFKTEITLANGEIRKRPLIETNGETGEIVWDKGRDFATVRKVLSMPQVNIVKKTEVQTGGFSKESILPKRNSDKLIARKKDWDPKKYGGFVSPTVAYSVLVVAKVEKGKSKKLKSVKELLGITIMERSSFEKNPIDFLEAKGYKEVKKDLIIKLPKYSLFELENGRKRMLASARELQKGNELALPSKYVNFLYLASHYEKLKGSPEDNEQKQLFVEQHKHYLDEIIEQISEFSKRVILADANLDKVLSAYNKHRDKPIREQAENIIHLFTLTNLGAPAAFKYFDTTIDRKQYRSTKEVLDATLIHQSITGLYETRIDLSQLGGDEGADKRTADGSEFESPKKKRKV

SEQ ID NO: 346 - protein, 1588 aa, synthetic construct
  REGION 1..1588: note = 06. monoABE8.1_bpNLS + T166R polypeptide sequence
MSEVEFSHEYWMRHALTLAKRARDEREVPVGAVLVLNNRVIGEGWNRAIGLHDPTAHAEIMALRQGGLVMQNYRLIDATLYVTFEPCVMCAGAMIHSRIGRVVFGVRNAKTGAAGSLMDVLHYPGMNHRVEITEGILADECAALLCYFFRMPRQVFNAQKKAQSSRDSGGSSGGSSGSETPGTSESATPESSGGSSGGSDKKYSIGLAIGTNSVGWAVITDEYKVPSKKFKVLGNTDRHSIKKNLIGALLFDSGETAEATRLKRTARRRYTRRKNRICYLQEIFSNEMAKVDDSFFHRLEESFLVEEDKKHERHPIFGNIVDEVAYHEKYPTIYHLRKKLVDSTDKADLRLIYLALAHMIKFRGHFLIEGDLNPDNSDVDKLFIQLVQTYNQLFEENPINASGVDAKAILSARLSKSRRLENLIAQLPGEKKNGLFGNLIALSLGLTPNFKSNFDLAEDAKLQLSKDTYDDDLDNLLAQIGDQYADLFLAAKNLSDAILLSDILRVNTEITKAPLSASMIKRYDEHHQDLTLLKALVRQQLPEKYKEIFFDQSKNGYAGYIDGGASQEEFYKFIKPILEKMDGTEELLVKLNREDLLRKQRTFDNGSIPHQIHLGELHAILRRQEDFYPFLKDNREKIEKILTFRIPYYVGPLARGNSRFAWMTRKSEETITPWNFEEVVDKGASAQSFIERMTNFDKNLPNEKVLPKHSLLYEYFTVYNELTKVKYVTEGMRKPAFLSGEQKKAIVDLLFKTNRKVTVKQLKEDYFKKIECFDSVEISGVEDRFNASLGTYHDLLKIIKDKDFLDNEENEDILEDIVLTLTLFEDREMIEERLKTYAHLFDDKVMKQLKRRRYTGWGRLSRKLINGIRDKQSGKTILDFLKSDGFANRNFMQLIHDDSLTFKEDIQKAQVSGQGDSLHEHIANLAGSPAIKKGILQTVKVVDELVKVMGRHKPENIVIEMARENQTTQKGQKNSRERMKRIEEGIKELGSQILKEHPVENTQLQNEKLYLYYLQNGRDMYVDQELDINRLSDYDVDHIVPQSFLKDDSIDNKVLTRSDKNRGKSDNVPSEEVVKKMKNYWRQLLNAKLITQRKFDNLTKAERGGLSELDKAGFIKRQLVETRQITKHVAQILDSRMNTKYDENDKLIREVKVITLKSKLVSDFRKDFQFYKVREINNYHHAHDAYLNAVVGTALIKKYPKLESEFVYGDYKVYDVRKMIAKSEQEIGKATAKYFFYSNIMNFFKTEITLANGEIRKRPLIETNGETGEIVWDKGRDFATVRKVLSMPQVNIVKKTEVQTGGFSKESILPKRNSDKLIARKKDWDPKKYGGFVSPTVAYSVLVVAKVEKGKSKKLKSVKELLGITIMERSSFEKNPIDFLEAKGYKEVKKDLIIKLPKYSLFELENGRKRMLASARELQKGNELALPSKYVNFLYLASHYEKLKGSPEDNEQKQLFVEQHKHYLDEIIEQISEFSKRVILADANLDKVLSAYNKHRDKPIREQAENIIHLFTLTNLGAPAAFKYFDTTIDRKQYRSTKEVLDATLIHQSITGLYETRIDLSQLGGDEGADKRTADGSEFESPKKKRKV

SEQ ID NO: 347 - protein, 1588 aa, synthetic construct
  REGION 1..1588: note = 07. monoABE8.1_bpNLS + Q154R polypeptide sequence
MSEVEFSHEYWMRHALTLAKRARDEREVPVGAVLVLNNRVIGEGWNRAIGLHDPTAHAEIMALRQGGLVMQNYRLIDATLYVTFEPCVMCAGAMIHSRIGRVVFGVRNAKTGAAGSLMDVLHYPGMNHRVEITEGILADECAALLCYFFRMPRRVFNAQKKAQSSTDSGGSSGGSSGSETPGTSESATPESSGGSSGGSDKKYSIGLAIGTNSVGWAVITDEYKVPSKKFKVLGNTDRHSIKKNLIGALLFDSGETAEATRLKRTARRRYTRRKNRICYLQEIFSNEMAKVDDSFFHRLEESFLVEEDKKHERHPIFGNIVDEVAYHEKYPTIYHLRKKLVDSTDKADLRLIYLALAHMIKFRGHFLIEGDLNPDNSDVDKLFIQLVQTYNQLFEENPINASGVDAKAILSARLSKSRRLENLIAQLPGEKKNGLFGNLIALSLGLTPNFKSNFDLAEDAKLQLSKDTYDDDLDNLLAQIGDQYADLFLAAKNLSDAILLSDILRVNTEITKAPLSASMIKRYDEHHQDLTLLKALVRQQLPEKYKEIFFDQSKNGYAGYIDGGASQEEFYKFIKPILEKMDGTEELLVKLNREDLLRKQRTFDNGSIPHQIHLGELHAILRRQEDFYPFLKDNREKIEKILTFRIPYYVGPLARGNSRFAWMTRKSEETITPWNFEEVVDKGASAQSFIERMTNFDKNLPNEKVLPKHSLLYEYFTVYNELTKVKYVTEGMRKPAFLSGEQKKAIVDLLFKTNRKVTVKQLKEDYFKKIECFDSVEISGVEDRFNASLGTYHDLLKIIKDKDFLDNEENEDILEDIVLTLTLFEDREMIEERLKTYAHLFDDKVMKQLKRRRYTGWGRLSRKLINGIRDKQSGKTILDFLKSDGFANRNFMQLIHDDSLTFKEDIQKAQVSGQGDSLHEHIANLAGSPAIKKGILQTVKVVDELVKVMGRHKPENIVIEMARENQTTQKGQKNSRERMKRIEEGIKELGSQILKEHPVENTQLQNEKLYLYYLQNGRDMYVDQELDINRLSDYDVDHIVPQSFLKDDSIDNKVLTRSDKNRGKSDNVPSEEVVKKMKNYWRQLLNAKLITQRKFDNLTKAERGGLSELDKAGFIKRQLVETRQITKHVAQILDSRMNTKYDENDKLIREVKVITLKSKLVSDFRKDFQFYKVREINNYHHAHDAYLNAVVGTALIKKYPKLESEFVYGDYKVYDVRKMIAKSEQEIGKATAKYFFYSNIMNFFKTEITLANGEIRKRPLIETNGETGEIVWDKGRDFATVRKVLSMPQVNIVKKTEVQTGGFSKESILPKRNSDKLIARKKDWDPKKYGGFVSPTVAYSVLVVAKVEKGKSKKLKSVKELLGITIMERSSFEKNPIDFLEAKGYKEVKKDLIIKLPKYSLFELENGRKRMLASARELQKGNELALPSKYVNFLYLASHYEKLKGSPEDNEQKQLFVEQHKHYLDEIIEQISEFSKRVILADANLDKVLSAYNKHRDKPIREQAENIIHLFTLTNLGAPAAFKYFDTTIDRKQYRSTKEVLDATLIHQSITGLYETRIDLSQLGGDEGADKRTADGSEFESPKKKRKV

SEQ ID NO: 348 - protein, 1588 aa, synthetic construct
  REGION 1..1588: note = 08. monoABE8.1_bpNLS +Y147R_Q154R_Y123H polypeptide sequence
MSEVEFSHEYWMRHALTLAKRARDEREVPVGAVLVLNNRVIGEGWNRAIGLHDPTAHAEIMALRQGGLVMQNYRLIDATLYVTFEPCVMCAGAMIHSRIGRVVFGVRNAKTGAAGSLMDVLHHPGMNHRVEITEGILADECAALLCRFFRMPRRVFNAQKKAQSSTDSGGSSGGSSGSETPGTSESATPESSGGSSGGSDKKYSIGLAIGTNSVGWAVITDEYKVPSKKFKVLGNTDRHSIKKNLIGALLFDSGETAEATRLKRTARRRYTRRKNRICYLQEIFSNEMAKVDDSFFHRLEESFLVEEDKKHERHPIFGNIVDEVAYHEKYPTIYHLRKKLVDSTDKADLRLIYLALAHMIKFRGHFLIEGDLNPDNSDVDKLFIQLVQTYNQLFEENPINASGVDAKAILSARLSKSRRLENLIAQLPGEKKNGLFGNLIALSLGLTPNFKSNFDLAEDAKLQLSKDTYDDDLDNLLAQIGDQYADLFLAAKNLSDAILLSDILRVNTEITKAPLSASMIKRYDEHHQDLTLLKALVRQQLPEKYKEIFFDQSKNGYAGYIDGGASQEEFYKFIKPILEKMDGTEELLVKLNREDLLRKQRTFDNGSIPHQIHLGELHAILRRQEDFYPFLKDNREKIEKILTFRIPYYVGPLARGNSRFAWMTRKSEETITPWNFEEVVDKGASAQSFIERMTNFDKNLPNEKVLPKHSLLYEYFTVYNELTKVKYVTEGMRKPAFLSGEQKKAIVDLLFKTNRKVTVKQLKEDYFKKIECFDSVEISGVEDRFNASLGTYHDLLKIIKDKDFLDNEENEDILEDIVLTLTLFEDREMIEERLKTYAHLFDDKVMKQLKRRRYTGWGRLSRKLINGIRDKQSGKTILDFLKSDGFANRNFMQLIHDDSLTFKEDIQKAQVSGQGDSLHEHIANLAGSPAIKKGILQTVKVVDELVKVMGRHKPENIVIEMARENQTTQKGQKNSRERMKRIEEGIKELGSQILKEHPVENTQLQNEKLYLYYLQNGRDMYVDQELDINRLSDYDVDHIVPQSFLKDDSIDNKVLTRSDKNRGKSDNVPSEEVVKKMKNYWRQLLNAKLITQRKFDNLTKAERGGLSELDKAGFIKRQLVETRQITKHVAQILDSRMNTKYDENDKLIREVKVITLKSKLVSDFRKDFQFYKVREINNYHHAHDAYLNAVVGTALIKKYPKLESEFVYGDYKVYDVRKMIAKSEQEIGKATAKYFFYSNIMNFFKTEITLANGEIRKRPLIETNGETGEIVWDKGRDFATVRKVLSMPQVNIVKKTEVQTGGFSKESILPKRNSDKLIARKKDWDPKKYGGFVSPTVAYSVLVVAKVEKGKSKKLKSVKELLGITIMERSSFEKNPIDFLEAKGYKEVKKDLIIKLPKYSLFELENGRKRMLASARELQKGNELALPSKYVNFLYLASHYEKLKGSPEDNEQKQLFVEQHKHYLDEIIEQISEFSKRVILADANLDKVLSAYNKHRDKPIREQAENIIHLFTLTNLGAPAAFKYFDTTIDRKQYRSTKEVLDATLIHQSITGLYETRIDLSQLGGDEGADKRTADGSEFESPKKKRKV

SEQ ID NO: 349 - protein, 1588 aa, synthetic construct
  REGION 1..1588: note = 09. monoABE8.1_bpNLS +Y147R_Q154R_I76Y polypeptide sequence
MSEVEFSHEYWMRHALTLAKRARDEREVPVGAVLVLNNRVIGEGWNRAIGLHDPTAHAEIMALRQGGLVMQNYRLYDATLYVTFEPCVMCAGAMIHSRIGRVVFGVRNAKTGAAGSLMDVLHYPGMNHRVEITEGILADECAALLCRFFRMPRRVFNAQKKAQSSTDSGGSSGGSSGSETPGTSESATPESSGGSSGGSDKKYSIGLAIGTNSVGWAVITDEYKVPSKKFKVLGNTDRHSIKKNLIGALLFDSGETAEATRLKRTARRRYTRRKNRICYLQEIFSNEMAKVDDSFFHRLEESFLVEEDKKHERHPIFGNIVDEVAYHEKYPTIYHLRKKLVDSTDKADLRLIYLALAHMIKFRGHFLIEGDLNPDNSDVDKLFIQLVQTYNQLFEENPINASGVDAKAILSARLSKSRRLENLIAQLPGEKKNGLFGNLIALSLGLTPNFKSNFDLAEDAKLQLSKDTYDDDLDNLLAQIGDQYADLFLAAKNLSDAILLSDILRVNTEITKAPLSASMIKRYDEHHQDLTLLKALVRQQLPEKYKEIFFDQSKNGYAGYIDGGASQEEFYKFIKPILEKMDGTEELLVKLNREDLLRKQRTFDNGSIPHQIHLGELHAILRRQEDFYPFLKDNREKIEKILTFRIPYYVGPLARGNSRFAWMTRKSEETITPWNFEEVVDKGASAQSFIERMTNFDKNLPNEKVLPKHSLLYEYFTVYNELTKVKYVTEGMRKPAFLSGEQKKAIVDLLFKTNRKVTVKQLKEDYFKKIECFDSVEISGVEDRFNASLGTYHDLLKIIKDKDFLDNEENEDILEDIVLTLTLFEDREMIEERLKTYAHLFDDKVMKQLKRRRYTGWGRLSRKLINGIRDKQSGKTILDFLKSDGFANRNFMQLIHDDSLTFKEDIQKAQVSGQGDSLHEHIANLAGSPAIKKGILQTVKVVDELVKVMGRHKPENIVIEMARENQTTQKGQKNSRERMKRIEEGIKELGSQILKEHPVENTQLQNEKLYLYYLQNGRDMYVDQELDINRLSDYDVDHIVPQSFLKDDSIDNKVLTRSDKNRGKSDNVPSEEVVKKMKNYWRQLLNAKLITQRKFDNLTKAERGGLSELDKAGFIKRQLVETRQITKHVAQILDSRMNTKYDENDKLIREVKVITLKSKLVSDFRKDFQFYKVREINNYHHAHDAYLNAVVGTALIKKYPKLESEFVYGDYKVYDVRKMIAKSEQEIGKATAKYFFYSNIMNFFKTEITLANGEIRKRPLIETNGETGEIVWDKGRDFATVRKVLSMPQVNIVKKTEVQTGGFSKESILPKRNSDKLIARKKDWDPKKYGGFVSPTVAYSVLVVAKVEKGKSKKLKSVKELLGITIMERSSFEKNPIDFLEAKGYKEVKKDLIIKLPKYSLFELENGRKRMLASARELQKGNELALPSKYVNFLYLASHYEKLKGSPEDNEQKQLFVEQHKHYLDEIIEQISEFSKRVILADANLDKVLSAYNKHRDKPIREQAENIIHLFTLTNLGAPAAFKYFDTTIDRKQYRSTKEVLDATLIHQSITGLYETRIDLSQLGGDEGADKRTADGSEFESPKKKRKV

SEQ ID NO: 350 - protein, 1588 aa, synthetic construct
  REGION 1..1588: note = 10. monoABE8.1_bpNLS +Y147R_Q154R_T166R polypeptide sequence
MSEVEFSHEYWMRHALTLAKRARDEREVPVGAVLVLNNRVIGEGWNRAIGLHDPTAHAEIMALRQGGLVMQNYRLIDATLYVTFEPCVMCAGAMIHSRIGRVVFGVRNAKTGAAGSLMDVLHYPGMNHRVEITEGILADECAALLCRFFRMPRRVFNAQKKAQSSRDSGGSSGGSSGSETPGTSESATPESSGGSSGGSDKKYSIGLAIGTNSVGWAVITDEYKVPSKKFKVLGNTDRHSIKKNLIGALLFDSGETAEATRLKRTARRRYTRRKNRICYLQEIFSNEMAKVDDSFFHRLEESFLVEEDKKHERHPIFGNIVDEVAYHEKYPTIYHLRKKLVDSTDKADLRLIYLALAHMIKFRGHFLIEGDLNPDNSDVDKLFIQLVQTYNQLFEENPINASGVDAKAILSARLSKSRRLENLIAQLPGEKKNGLFGNLIALSLGLTPNFKSNFDLAEDAKLQLSKDTYDDDLDNLLAQIGDQYADLFLAAKNLSDAILLSDILRVNTEITKAPLSASMIKRYDEHHQDLTLLKALVRQQLPEKYKEIFFDQSKNGYAGYIDGGASQEEFYKFIKPILEKMDGTEELLVKLNREDLLRKQRTFDNGSIPHQIHLGELHAILRRQEDFYPFLKDNREKIEKILTFRIPYYVGPLARGNSRFAWMTRKSEETITPWNFEEVVDKGASAQSFIERMTNFDKNLPNEKVLPKHSLLYEYFTVYNELTKVKYVTEGMRKPAFLSGEQKKAIVDLLFKTNRKVTVKQLKEDYFKKIECFDSVEISGVEDRFNASLGTYHDLLKIIKDKDFLDNEENEDILEDIVLTLTLFEDREMIEERLKTYAHLFDDKVMKQLKRRRYTGWGRLSRKLINGIRDKQSGKTILDFLKSDGFANRNFMQLIHDDSLTFKEDIQKAQVSGQGDSLHEHIANLAGSPAIKKGILQTVKVVDELVKVMGRHKPENIVIEMARENQTTQKGQKNSRERMKRIEEGIKELGSQILKEHPVENTQLQNEKLYLYYLQNGRDMYVDQELDINRLSDYDVDHIVPQSFLKDDSIDNKVLTRSDKNRGKSDNVPSEEVVKKMKNYWRQLLNAKLITQRKFDNLTKAERGGLSELDKAGFIKRQLVETRQITKHVAQILDSRMNTKYDENDKLIREVKVITLKSKLVSDFRKDFQFYKVREINNYHHAHDAYLNAVVGTALIKKYPKLESEFVYGDYKVYDVRKMIAKSEQEIGKATAKYFFYSNIMNFFKTEITLANGEIRKRPLIETNGETGEIVWDKGRDFATVRKVLSMPQVNIVKKTEVQTGGFSKESILPKRNSDKLIARKKDWDPKKYGGFVSPTVAYSVLVVAKVEKGKSKKLKSVKELLGITIMERSSFEKNPIDFLEAKGYKEVKKDLIIKLPKYSLFELENGRKRMLASARELQKGNELALPSKYVNFLYLASHYEKLKGSPEDNEQKQLFVEQHKHYLDEIIEQISEFSKRVILADANLDKVLSAYNKHRDKPIREQAENIIHLFTLTNLGAPAAFKYFDTTIDRKQYRSTKEVLDATLIHQSITGLYETRIDLSQLGGDEGADKRTADGSEFESPKKKRKV

SEQ ID NO: 351 - protein, 1588 aa, synthetic construct
  REGION 1..1588: note = 11. monoABE8.1_bpNLS +Y147T_Q154R polypeptide sequence
MSEVEFSHEYWMRHALTLAKRARDEREVPVGAVLVLNNRVIGEGWNRAIGLHDPTAHAEIMALRQGGLVMQNYRLIDATLYVTFEPCVMCAGAMIHSRIGRVVFGVRNAKTGAAGSLMDVLHYPGMNHRVEITEGILADECAALLCTFFRMPRRVFNAQKKAQSSTDSGGSSGGSSGSETPGTSESATPESSGGSSGGSDKKYSIGLAIGTNSVGWAVITDEYKVPSKKFKVLGNTDRHSIKKNLIGALLFDSGETAEATRLKRTARRRYTRRKNRICYLQEIFSNEMAKVDDSFFHRLEESFLVEEDKKHERHPIFGNIVDEVAYHEKYPTIYHLRKKLVDSTDKADLRLIYLALAHMIKFRGHFLIEGDLNPDNSDVDKLFIQLVQTYNQLFEENPINASGVDAKAILSARLSKSRRLENLIAQLPGEKKNGLFGNLIALSLGLTPNFKSNFDLAEDAKLQLSKDTYDDDLDNLLAQIGDQYADLFLAAKNLSDAILLSDILRVNTEITKAPLSASMIKRYDEHHQDLTLLKALVRQQLPEKYKEIFFDQSKNGYAGYIDGGASQEEFYKFIKPILEKMDGTEELLVKLNREDLLRKQRTFDNGSIPHQIHLGELHAILRRQEDFYPFLKDNREKIEKILTFRIPYYVGPLARGNSRFAWMTRKSEETITPWNFEEVVDKGASAQSFIERMTNFDKNLPNEKVLPKHSLLYEYFTVYNELTKVKYVTEGMRKPAFLSGEQKKAIVDLLFKTNRKVTVKQLKEDYFKKIECFDSVEISGVEDRFNASLGTYHDLLKIIKDKDFLDNEENEDILEDIVLTLTLFEDREMIEERLKTYAHLFDDKVMKQLKRRRYTGWGRLSRKLINGIRDKQSGKTILDFLKSDGFANRNFMQLIHDDSLTFKEDIQKAQVSGQGDSLHEHIANLAGSPAIKKGILQTVKVVDELVKVMGRHKPENIVIEMARENQTTQKGQKNSRERMKRIEEGIKELGSQILKEHPVENTQLQNEKLYLYYLQNGRDMYVDQELDINRLSDYDVDHIVPQSFLKDDSIDNKVLTRSDKNRGKSDNVPSEEVVKKMKNYWRQLLNAKLITQRKFDNLTKAERGGLSELDKAGFIKRQLVETRQITKHVAQILDSRMNTKYDENDKLIREVKVITLKSKLVSDFRKDFQFYKVREINNYHHAHDAYLNAVVGTALIKKYPKLESEFVYGDYKVYDVRKMIAKSEQEIGKATAKYFFYSNIMNFFKTEITLANGEIRKRPLIETNGETGEIVWDKGRDFATVRKVLSMPQVNIVKKTEVQTGGFSKESILPKRNSDKLIARKKDWDPKKYGGFVSPTVAYSVLVVAKVEKGKSKKLKSVKELLGITIMERSSFEKNPIDFLEAKGYKEVKKDLIIKLPKYSLFELENGRKRMLASARELQKGNELALPSKYVNFLYLASHYEKLKGSPEDNEQKQLFVEQHKHYLDEIIEQISEFSKRVILADANLDKVLSAYNKHRDKPIREQAENIIHLFTLTNLGAPAAFKYFDTTIDRKQYRSTKEVLDATLIHQSITGLYETRIDLSQLGGDEGADKRTADGSEFESPKKKRKV

SEQ ID NO: 352 - protein, 1588 aa, synthetic construct
  REGION 1..1588: note = 12. monoABE8.1_bpNLS +Y147T_Q154S polypeptide sequence
MSEVEFSHEYWMRHALTLAKRARDEREVPVGAVLVLNNRVIGEGWNRAIGLHDPTAHAEIMALRQGGLVMQNYRLIDATLYVTFEPCVMCAGAMIHSRIGRVVFGVRNAKTGAAGSLMDVLHYPGMNHRVEITEGILADECAALLCTFFRMPRSVFNAQKKAQSSTDSGGSSGGSSGSETPGTSESATPESSGGSSGGSDKKYSIGLAIGTNSVGWAVITDEYKVPSKKFKVLGNTDRHSIKKNLIGALLFDSGETAEATRLKRTARRRYTRRKNRICYLQEIFSNEMAKVDDSFFHRLEESFLVEEDKKHERHPIFGNIVDEVAYHEKYPTIYHLRKKLVDSTDKADLRLIYLALAHMIKFRGHFLIEGDLNPDNSDVDKLFIQLVQTYNQLFEENPINASGVDAKAILSARLSKSRRLENLIAQLPGEKKNGLFGNLIALSLGLTPNFKSNFDLAEDAKLQLSKDTYDDDLDNLLAQIGDQYADLFLAAKNLSDAILLSDILRVNTEITKAPLSASMIKRYDEHHQDLTLLKALVRQQLPEKYKEIFFDQSKNGYAGYIDGGASQEEFYKFIKPILEKMDGTEELLVKLNREDLLRKQRTFDNGSIPHQIHLGELHAILRRQEDFYPFLKDNREKIEKILTFRIPYYVGPLARGNSRFAWMTRKSEETITPWNFEEVVDKGASAQSFIERMTNFDKNLPNEKVLPKHSLLYEYFTVYNELTKVKYVTEGMRKPAFLSGEQKKAIVDLLFKTNRKVTVKQLKEDYFKKIECFDSVEISGVEDRFNASLGTYHDLLKIIKDKDFLDNEENEDILEDIVLTLTLFEDREMIEERLKTYAHLFDDKVMKQLKRRRYTGWGRLSRKLINGIRDKQSGKTILDFLKSDGFANRNFMQLIHDDSLTFKEDIQKAQVSGQGDSLHEHIANLAGSPAIKKGILQTVKVVDELVKVMGRHKPENIVIEMARENQTTQKGQKNSRERMKRIEEGIKELGSQILKEHPVENTQLQNEKLYLYYLQNGRDMYVDQELDINRLSDYDVDHIVPQSFLKDDSIDNKVLTRSDKNRGKSDNVPSEEVVKKMKNYWRQLLNAKLITQRKFDNLTKAERGGLSELDKAGFIKRQLVETRQITKHVAQILDSRMNTKYDENDKLIREVKVITLKSKLVSDFRKDFQFYKVREINNYHHAHDAYLNAVVGTALIKKYPKLESEFVYGDYKVYDVRKMIAKSEQEIGKATAKYFFYSNIMNFFKTEITLANGEIRKRPLIETNGETGEIVWDKGRDFATVRKVLSMPQVNIVKKTEVQTGGFSKESILPKRNSDKLIARKKDWDPKKYGGFVSPTVAYSVLVVAKVEKGKSKKLKSVKELLGITIMERSSFEKNPIDFLEAKGYKEVKKDLIIKLPKYSLFELENGRKRMLASARELQKGNELALPSKYVNFLYLASHYEKLKGSPEDNEQKQLFVEQHKHYLDEIIEQISEFSKRVILADANLDKVLSAYNKHRDKPIREQAENIIHLFTLTNLGAPAAFKYFDTTIDRKQYRSTKEVLDATLIHQSITGLYETRIDLSQLGGDEGADKRTADGSEFESPKKKRKV

SEQ ID NO: 353 - protein, 1588 aa, synthetic construct
  REGION 1..1588: note = 13. monoABE8.1_bpNLS +H123Y123H_Y147R_Q154R_I76Y polypeptide sequence
MSEVEFSHEYWMRHALTLAKRARDEREVPVGAVLVLNNRVIGEGWNRAIGLHDPTAHAEIMALRQGGLVMQNYRLYDATLYVTFEPCVMCAGAMIHSRIGRVVFGVRNAKTGAAGSLMDVLHHPGMNHRVEITEGILADECAALLCRFFRMPRRVFNAQKKAQSSTDSGGSSGGSSGSETPGTSESATPESSGGSSGGSDKKYSIGLAIGTNSVGWAVITDEYKVPSKKFKVLGNTDRHSIKKNLIGALLFDSGETAEATRLKRTARRRYTRRKNRICYLQEIFSNEMAKVDDSFFHRLEESFLVEEDKKHERHPIFGNIVDEVAYHEKYPTIYHLRKKLVDSTDKADLRLIYLALAHMIKFRGHFLIEGDLNPDNSDVDKLFIQLVQTYNQLFEENPINASGVDAKAILSARLSKSRRLENLIAQLPGEKKNGLFGNLIALSLGLTPNFKSNFDLAEDAKLQLSKDTYDDDLDNLLAQIGDQYADLFLAAKNLSDAILLSDILRVNTEITKAPLSASMIKRYDEHHQDLTLLKALVRQQLPEKYKEIFFDQSKNGYAGYIDGGASQEEFYKFIKPILEKMDGTEELLVKLNREDLLRKQRTFDNGSIPHQIHLGELHAILRRQEDFYPFLKDNREKIEKILTFRIPYYVGPLARGNSRFAWMTRKSEETITPWNFEEVVDKGASAQSFIERMTNFDKNLPNEKVLPKHSLLYEYFTVYNELTKVKYVTEGMRKPAFLSGEQKKAIVDLLFKTNRKVTVKQLKEDYFKKIECFDSVEISGVEDRFNASLGTYHDLLKIIKDKDFLDNEENEDILEDIVLTLTLFEDREMIEERLKTYAHLFDDKVMKQLKRRRYTGWGRLSRKLINGIRDKQSGKTILDFLKSDGFANRNFMQLIHDDSLTFKEDIQKAQVSGQGDSLHEHIANLAGSPAIKKGILQTVKVVDELVKVMGRHKPENIVIEMARENQTTQKGQKNSRERMKRIEEGIKELGSQILKEHPVENTQLQNEKLYLYYLQNGRDMYVDQELDINRLSDYDVDHIVPQSFLKDDSIDNKVLTRSDKNRGKSDNVPSEEVVKKMKNYWRQLLNAKLITQRKFDNLTKAERGGLSELDKAGFIKRQLVETRQITKHVAQILDSRMNTKYDENDKLIREVKVITLKSKLVSDFRKDFQFYKVREINNYHHAHDAYLNAVVGTALIKKYPKLESEFVYGDYKVYDVRKMIAKSEQEIGKATAKYFFYSNIMNFFKTEITLANGEIRKRPLIETNGETGEIVWDKGRDFATVRKVLSMPQVNIVKKTEVQTGGFSKESILPKRNSDKLIARKKDWDPKKYGGFVSPTVAYSVLVVAKVEKGKSKKLKSVKELLGITIMERSSFEKNPIDFLEAKGYKEVKKDLIIKLPKYSLFELENGRKRMLASARELQKGNELALPSKYVNFLYLASHYEKLKGSPEDNEQKQLFVEQHKHYLDEIIEQISEFSKRVILADANLDKVLSAYNKHRDKPIREQAENIIHLFTLTNLGAPAAFKYFDTTIDRKQYRSTKEVLDATLIHQSITGLYETRIDLSQLGGDEGADKRTADGSEFESPKKKRKV

SEQ ID NO: 354 - protein, 1588 aa, synthetic construct
  REGION 1..1588: note = 14. monoABE8.1_bpNLS + V82S +Q154R polypeptide sequence
MSEVEFSHEYWMRHALTLAKRARDEREVPVGAVLVLNNRVIGEGWNRAIGLHDPTAHAEIMALRQGGLVMQNYRLIDATLYSTFEPCVMCAGAMIHSRIGRVVFGVRNAKTGAAGSLMDVLHYPGMNHRVEITEGILADECAALLCYFFRMPRRVFNAQKKAQSSTDSGGSSGGSSGSETPGTSESATPESSGGSSGGSDKKYSIGLAIGTNSVGWAVITDEYKVPSKKFKVLGNTDRHSIKKNLIGALLFDSGETAEATRLKRTARRRYTRRKNRICYLQEIFSNEMAKVDDSFFHRLEESFLVEEDKKHERHPIFGNIVDEVAYHEKYPTIYHLRKKLVDSTDKADLRLIYLALAHMIKFRGHFLIEGDLNPDNSDVDKLFIQLVQTYNQLFEENPINASGVDAKAILSARLSKSRRLENLIAQLPGEKKNGLFGNLIALSLGLTPNFKSNFDLAEDAKLQLSKDTYDDDLDNLLAQIGDQYADLFLAAKNLSDAILLSDILRVNTEITKAPLSASMIKRYDEHHQDLTLLKALVRQQLPEKYKEIFFDQSKNGYAGYIDGGASQEEFYKFIKPILEKMDGTEELLVKLNREDLLRKQRTFDNGSIPHQIHLGELHAILRRQEDFYPFLKDNREKIEKILTFRIPYYVGPLARGNSRFAWMTRKSEETITPWNFEEVVDKGASAQSFIERMTNFDKNLPNEKVLPKHSLLYEYFTVYNELTKVKYVTEGMRKPAFLSGEQKKAIVDLLFKTNRKVTVKQLKEDYFKKIECFDSVEISGVEDRFNASLGTYHDLLKIIKDKDFLDNEENEDILEDIVLTLTLFEDREMIEERLKTYAHLFDDKVMKQLKRRRYTGWGRLSRKLINGIRDKQSGKTILDFLKSDGFANRNFMQLIHDDSLTFKEDIQKAQVSGQGDSLHEHIANLAGSPAIKKGILQTVKVVDELVKVMGRHKPENIVIEMARENQTTQKGQKNSRERMKRIEEGIKELGSQILKEHPVENTQLQNEKLYLYYLQNGRDMYVDQELDINRLSDYDVDHIVPQSFLKDDSIDNKVLTRSDKNRGKSDNVPSEEVVKKMKNYWRQLLNAKLITQRKFDNLTKAERGGLSELDKAGFIKRQLVETRQITKHVAQILDSRMNTKYDENDKLIREVKVITLKSKLVSDFRKDFQFYKVREINNYHHAHDAYLNAVVGTALIKKYPKLESEFVYGDYKVYDVRKMIAKSEQEIGKATAKYFFYSNIMNFFKTEITLANGEIRKRPLIETNGETGEIVWDKGRDFATVRKVLSMPQVNIVKKTEVQTGGFSKESILPKRNSDKLIARKKDWDPKKYGGFVSPTVAYSVLVVAKVEKGKSKKLKSVKELLGITIMERSSFEKNPIDFLEAKGYKEVKKDLIIKLPKYSLFELENGRKRMLASARELQKGNELALPSKYVNFLYLASHYEKLKGSPEDNEQKQLFVEQHKHYLDEIIEQISEFSKRVILADANLDKVLSAYNKHRDKPIREQAENIIHLFTLTNLGAPAAFKYFDTTIDRKQYRSTKEVLDATLIHQSITGLYETRIDLSQLGGDEGADKRTADGSEFESPKKKRKV

SEQ ID NO: 355 - protein, 4 aa, synthetic construct
  REGION 1..4: note = synthetic peptide sequence
SGGS

SEQ ID NO: 356 - protein, 24 aa, synthetic construct
  REGION 1..24: note = synthetic peptide sequence
SGGSSGSETPGTSESATPESSGGS

SEQ ID NO: 357 - protein, 32 aa, synthetic construct
  REGION 1..32: note = synthetic polypeptide sequence
SGGSSGGSSGSETPGTSESATPESSGGSSGGS

SEQ ID NO: 358 - protein, 104 aa, synthetic construct
  REGION 1..104: note = synthetic polypeptide sequence
GGSGGSPGSPAGSPTSTEEGTSESATPESGPGTSTEPSEGSAPGSPAGSPTSTEEGTSTEPSEGSAPGTSTEPSEGSAPGTSESATPESGPGSEPATSGGSGGS

SEQ ID NO: 359 - protein, 24 aa, synthetic construct
  REGION 1..24: note = synthetic peptide sequence
SGGSSGGSSGSETPGTSESATPES

SEQ ID NO: 360 - protein, 40 aa, synthetic construct
  REGION 1..40: note = synthetic polypeptide sequence
SGGSSGGSSGSETPGTSESATPESSGGSSGGSSGGSSGGS

SEQ ID NO: 361 - protein, 64 aa, synthetic construct
  REGION 1..64: note = synthetic polypeptide sequence
SGGSSGGSSGSETPGTSESATPESSGGSSGGSSGGSSGGSSGSETPGTSESATPESSGGSSGGS

SEQ ID NO: 362 - protein, 92 aa, synthetic construct
  REGION 1..92: note = synthetic polypeptide sequence
PGSPAGSPTSTEEGTSESATPESGPGTSTEPSEGSAPGSPAGSPTSTEEGTSTEPSEGSAPGTSTEPSEGSAPGTSESATPESGPGSEPATS

SEQ ID NO: 363 - protein, 5 aa, synthetic construct
  REGION 1..5: note = synthetic peptide sequence
PAPAP

SEQ ID NO: 364 - protein, 6 aa, synthetic construct
  REGION 1..6: note = synthetic peptide sequence
PAPAPA

SEQ ID NO: 365 - protein, 7 aa, synthetic construct
  REGION 1..7: note = synthetic peptide sequence
PAPAPAP

SEQ ID NO: 366 - protein, 8 aa, synthetic construct
  REGION 1..8: note = synthetic peptide sequence
PAPAPAPA

SEQ ID NO: 367 - protein, 9 aa, synthetic construct
  REGION 1..9: note = synthetic peptide sequence
PAPAPAPAP

SEQ ID NO: 368 - protein, 15 aa, synthetic construct
  REGION 1..15: note = synthetic peptide sequence
PAPAPAPAPAPAPAP

SEQ ID NO: 369 - protein, 21 aa, synthetic construct
  REGION 1..21: note = synthetic peptide sequence
PAPAPAPAPAPAPAPAPAPAP

SEQ ID NO: 370 - DNA, 306 bp, synthetic construct
  misc_feature 1..306: note = DnaE Intein-N polynucleotide sequence
  source 1..306: mol_type = other DNA
tgcctgtcatacgaaaccgagatactgacagtagaatatggccttctgccaatcgggaagattgtggagaaacggatagaatgcacagtttactctgtcgataacaatggtaacatttatactcagccagttgcccagtggcacgaccggggagagcaggaagtattcgaatactgtctggaggatggaagtctcattagggccactaaggaccacaaatttatgacagtcgatggccagatgctgcctatagacgaaatctttgagcgagagttggacctcatgcgagttgacaaccttcctaat

SEQ ID NO: 371 - protein, 102 aa, synthetic construct
  REGION 1..102: note = DnaE Intein-N polypeptide sequence
CLSYETEILTVEYGLLPIGKIVEKRIECTVYSVDNNGNIYTQPVAQWHDRGEQEVFEYCLEDGSLIRATKDHKFMTVDGQMLPIDEIFERELDLMRVDNLPN

SEQ ID NO: 372 - DNA, 108 bp, synthetic construct
  misc_feature 1..108: note = DnaE Intein-C polynucleotide sequence
  source 1..108: mol_type = other DNA
atgatcaagatagctacaaggaagtatcttggcaaacaaaacgtttatgatattggagtcgaaagagatcacaactttgctctgaagaacggattcatagcttctaat

SEQ ID NO: 373 - protein, 36 aa, synthetic construct
  REGION 1..36: note = DnaE Intein-C polypeptide sequence
MIKIATRKYLGKQNVYDIGVERDHNFALKNGFIASN

SEQ ID NO: 374 - DNA, 303 bp, synthetic construct
  misc_feature 1..303: note = Cfa-N polynucleotide sequence
  source 1..303: mol_type = other DNA
tgcctgtcttatgataccgagatacttaccgttgaatatggcttcttgcctattggaaagattgtcgaagagagaattgaatgcacagtatatactgtagacaagaatggtttcgtttacacacagcccattgctcaatggcacaatcgcggcgaacaagaagtatttgagtactgtctcgaggatggaagcatcatacgagcaactaaagatcataaattcatgaccactgacgggcagatgttgccaatagatgagatattcgagcggggcttggatctcaaacaagtggatggattgcca

SEQ ID NO: 375 - protein, 101 aa, synthetic construct
  REGION 1..101: note = Cfa-N polypeptide sequence
CLSYDTEILTVEYGFLPIGKIVEERIECTVYTVDKNGFVYTQPIAQWHNRGEQEVFEYCLEDGSIIRATKDHKFMTTDGQMLPIDEIFERGLDLKQVDGLP

SEQ ID NO: 376 - DNA, 159 bp, synthetic construct
  misc_feature 1..159: note = Cfa-C polynucleotide sequence
  source 1..159: mol_type = other DNA
atgaagaggactgccgatggatcagagtttgaatctcccaagaagaagaggaaagtaaagataatatctcgaaaaagtcttggtacccaaaatgtctatgatattggagtggagaaagatcacaacttccttctcaagaacggtctcgtagccagcaac

SEQ ID NO: 377 - protein, 53 aa, synthetic construct
  REGION 1..53: note = Cfa-C polypeptide sequence
MKRTADGSEFESPKKKRKVKIISRKSLGTQNVYDIGVEKDHNFLLKNGLVASN

SEQ ID NO: 378 - protein, 1081 aa, Neisseria meningitidis
  REGION 1..1081: note = MISC_FEATURE - Nme3Cas9; WP_002217928.1 type II CRISPR RNA-guided endonuclease Cas9 [Neisseria meningitidis]
  REGION 1..1081: note = MISC_FEATURE - NCBI Reference: WP_002217928.1; type II CRISPR RNA-guided endonuclease Cas9; Nme3Cas9 polypeptide sequence
MAAFKPNPINYILGLDIGIASVGWAMVEIDEEENPIRLIDLGVRVFERAEVPKTGDSLAMARRLARSVRRLTRRRAHRLLRARRLLKREGVLQAADFDENGLIKSLPNTPWQLRAAALDRKLTPLEWSAVLLHLIKHRGYLSQRKNEGETADKELGALLKGVADNAHALQTGDFRTPAELALNKFEKECGHIRNQRGDYSHTFSRKDLQAELNLLFEKQKEFGNPHVSGGLKEGIETLLMTQRPALSGDAVQKMLGHCTFEPAEPKAAKNTYTAERFIWLTKLNNLRILEQGSERPLTDTERATLMDEPYRKSKLTYAQARKLLSLEDTAFFKGLRYGKDNAEASTLMEMKAYHTISRALEKEGLKDKKSPLNLSPELQDEIGTAFSLFKTDEDITGRLKDRIQPEILEALLKHISFDKFVQISLKALRRIVPLMEQGKRYDEACAEIYGDHYGKKNTEEKIYLPPIPADEIRNPVVLRALSQARKVINGVVRRYGSPARIHIETAREVGKSFKDRKEIEKRQEENRKDREKAAAKFREYFPNFVGEPKSKDILKLRLYEQQHGKCLYSGKEINLGRLNEKGYVEIDHALPFSRTWDDSFNNKVLVLGSENQNKGNQTPYEYFNGKDNSREWQEFKARVETSRFPRSKKQRILLQKFDEDGFKERNLNDTRYVNRFLCQFVADRMRLTGKGKKRVFASNGQITNLLRGFWGLRKVRAENDRHHALDAVVVACSTVAMQQKITRFVRYKEMNAFDGKTIDKETGEVLHQKTHFPQPWEFFAQEVMIRVFGKPDGKPEFEEADTPEKLRTLLAEKLSSRPEAVHEYVTPLFVSRAPNRKMSGQGHMETVKSAKRLDEGVSVLRVPLTQLKLKDLEKMVNREREPKLYEALKARLEAHKDDPAKAFAEPFYKYDKAGNRTQQVKAVRVEQVQKTGVWVRNHNGIADNATMVRVDVFEKGDKYYLVPIYSWQVAKGILPDRAVVAYADEEDWTVIDESFRFKFVLYSNDLIKVQLKKDSFLGYFSGLDRATGAISLREHDLEKSKGKDGMHRIGVKTALSFQKYQIDEMGKEIRPCRLKKRPPVR

SEQ ID NO: 379 - RNA, 66 nt, synthetic construct
  misc_feature 1..66: note = Telomerase Ku Binding Motif oligonucleotide sequence
  source 1..66: mol_type = other RNA
ttcttgtcgtacttatagatcgctacgttatttcaattttgaaaatctgagtcctgggagtgcgga

SEQ ID NO: 380 - protein, 1094 aa, synthetic construct
  REGION 1..1094: note = Telomerase Ku Heterodimer polypeptide sequence
MSGWESYYKTEGDEEAEEEQEENLEASGDYKYSGRDSLIFLVDASKAMFESQSEDELTPFDMSIQCIQSVYISKIISSDRDLLAVVFYGTEKDKNSVNFKNIYVLQELDNPGAKRILELDQFKGQQGQKRFQDMMGHGSDYSLSEVLWVCANLFSDVQFKMSHKRIMLFTNEDNPHGNDSAKASRARTKAGDLRDTGIFLDLMHLKKPGGFDISLFYRDIISIAEDEDLRVHFEESSKLEDLLRKVRAKETRKRALSRLKLKLNKDIVISVGIYNLVQKALKPPPIKLYRETNEPVKTKTRTFNTSTGGLLLPSDTKRSQIYGSRQIILEKEETEELKRFDDPGLMLMGFKPLVLLKKHHYLRPSLFVYPEESLVIGSSTLFSALLIKCLEKEVAALCRYTPRRNIPPYFVALVPQEEELDDQKIQVTPPGFQLVFLPFADDKRKMPFTEKIMATPEQVGKMKAIVEKLRFTYRSDSFENPVLQQHFRNLEALALDLMEPEQAVDLTLPKVEAMNKRLGSLVDEFKELVYPPDYNPEGKVTKRKHDNEGSGSKRPKVEYSEEELKTHISKGTLGKFTVPMLKEACRAYGLKSGLKKQELLEALTKHFQDMVRSGNKAAVVLCMDVGFTMSNSIPGIESPFEQAKKVITMFVQRQVFAENKDEIALVLFGTDGTDNPLSGGDQYQNITVHRHLMLPDFDLLEDIESKIQPGSQQADFLDALIVSMDVIQHETIGKKFEKRHIEIFTDLSSRFSKSQLDIIIHSLKKCDISERHSIHWPCRLTIGSNLSIRIAAYKSILQERVKKTWTVVDAKTLKKEDIQKETVYCLNDDDETEVLKEDIIQGFRYGSDIVPFSKVDEEQMKYKSEGKCFSVLGFCKSSQVQRRFFMGNQVLKVFAARDDEAAAVALSSLIHALDDLDMVAIVRYAYDKRANPQVGVAFPHIKHNYECLVYVQLPFMEDLRQYMFSSLKNSKKYAPTEAQLNAVDALIDSMSLAKKDEKTDTLEDLFPTTKIPNPRFQRLFQCLLHRALHPREPLPPIQQHIWNMLNPPAEVTTKSQIPLSKIKTLFPLIEAKKKDQVTAQEIFQDNHEDGPTAK

SEQ ID NO: 381 - RNA, 10 nt, synthetic construct
  misc_feature 1..10: note = Telomerase Sm7 consensus site(single stranded) oligonucleotide sequence
  source 1..10: mol_type = other RNA
aatttttgga

SEQ ID NO: 382 - protein, 83 aa, synthetic construct
  REGION 1..83: note = MS2 coat protein polypeptide sequence
GSVIDVSSQRVNVQRPLDALGNSLNSPVIIKLKGDREFRGVLKSFDLHMNLVLNDAEELEDGEVTRRLGTVLIRGDNIVYISP

SEQ ID NO: 383 - RNA, 26 nt, synthetic construct
  misc_feature 1..26: note = PP7 phage operator stem loop oligonucleotide sequence
  source 1..26: mol_type = other RNA
ataaggagtttatatggaaaccctta

SEQ ID NO: 384 - protein, 128 aa, synthetic construct
  REGION 1..128: note = PP7 coat protein (PCP)polypeptide sequence
MSKTIVLSVGEATRTLTEIQSTADRQIFEEKVGPLVGRLRLTASLRQNGAKTAYRVNLKLDQADVVDCSTSVCGELPKVRYTQVWSHDVTIVANSTEASRKSLYDLTKSLVATSQVEDLVVNLVPLGR

SEQ ID NO: 385 - RNA, 19 nt, synthetic construct
  misc_feature 1..19: note = SfMu Com stem loop oligonucleotide sequence
  source 1..19: mol_type = other RNA
ctgaatgcctgcgagcatc

SEQ ID NO: 386 - protein, 62 aa, synthetic construct
  REGION 1..62: note = SfMu Com binding protein polypeptide sequence
MKSIRCKNCNKLLFKADSFDHIEIRCPRCKRHIIMLNACEHPTEKHCGKREKITHSDETVRY

SEQ ID NO: 387 - protein, 47 aa, synthetic construct
  REGION 1..47: note = leucine zipper polypeptide sequence
LEIRAAFLRQRNTALRTEVAELEQEVQRLENEVSQYETRYGPLGGGK

SEQ ID NO: 388 - protein, 47 aa, synthetic construct
  REGION 1..47: note = leucine zipper polypeptide sequence
LEIEAAFLERENTALETRVAELRQRVQRLRNRVSQYRTRYGPLGGGK

SEQ ID NO: 389 - protein, 457 aa, synthetic construct
EVQLVESGGGLVQPGRSLRLSCAASGFTFDDYAMHWVRQAPGKGLEWVSGISWNSGTIGYADSVKGRFTNSRDNAKNSLYLEMNSLRAEDTALYYCAKDSPPGYCSSASCYGAFDIWGQGTMVTVSSASTKGPSVFPLAPSSKSTSGGTAALGCLVKDYFPEPVTVSWNSGALTSGVHTFPAVLQSSGLYSLSSVVTVPSSSLGTQTYICNVNHKPSNTKVDKKVEPKSCDKTHTCPPCPAPELLGGPSVFLFPPKPKDTLMISRTPEVTCVVVDVSHEDPEVKFNWYVDGVEVHNAKTKPREEQYNSTYRVVSVLTVLHQDWLNGKEYKCKVSNKALPAPIEKTISKAKGQPREPQVYTLPPSRDELTKNQVSLTCLVKGFYPSDIAVEWESNGQPENNYKTTPPVLDSDGSFFLYSKLTVDKSRWQQGNVFSCSVMHEALHNHYTQKSLSLSPGK

SEQ ID NO: 390 - protein, 214 aa, synthetic construct
DVVMTQSPGTLSLSPGERATLSCRASQSVSSSYLAWYQQKPGQAPRLLIYGASSRATGIPDRFSGSGSGTDFTLTISRLEPEDFAVYYCQQYGTSLTFGGGTKLEIKRTVAAPSVFIFPPSDEQLKSGTASVVCLLNNFYPREAKVQWKVDNALQSGNSQESVTEQDSKDSTYSLSSTLTLSKADYEKHKVYACEVTHQGLSSPVTKSFNRGEC

SEQ ID NO: 391 - protein, 8 aa, synthetic construct
GFTFDDYA

SEQ ID NO: 392 - protein, 8 aa, synthetic construct
ISWNSGTI

SEQ ID NO: 393 - protein, 20 aa, synthetic construct
AKDSPPGYCSSASCYGAFDI

SEQ ID NO: 394 - protein, 7 aa, synthetic construct
QSVSSSY

SEQ ID NO: 395 - protein, 8 aa, synthetic construct
QQYGTSLT

SEQ ID NO: 396 - protein, 25 aa, synthetic construct [sequence omitted]

SEQ ID NO: 397 - protein, 17 aa, synthetic construct
MHWVRQAPGKGLEWVSG

SEQ ID NO: 398 - protein, 39 aa, synthetic construct
IGYADSVKGRFTNSRDNAKNSLYLEMNSLRAEDTALYYC

SEQ ID NO: 399 - protein, 11 aa, synthetic construct
WGQGTMVTVSS

SEQ ID NO: 400 - protein, 26 aa, synthetic construct
DVVMTQSPGTLSLSPGERATLSCRAS

SEQ ID NO: 401 - protein, 17 aa, synthetic construct
LAWYQQKPGQAPRLLIY

SEQ ID NO: 402 - protein, 36 aa, synthetic construct [sequence omitted]

SEQ ID NO: 403 - protein, 13 aa, synthetic construct
FGGGTKLEIKRTV

SEQ ID NO: 404 - protein, 448 aa, synthetic construct
QVQLQESGGGLVKPGGSLRLSCAASGFTFSSYSMNWVRQAPGKGLEWVSSIGTISSYIYYADSVKGRFTISRDNAKNSLYLQMNSLRAEDTAVYYCARDYYGGLFDYWGQGTLVTVSSASTKGPSVFPLAPSSKSTSGGTAALGCLVKDYFPEPVTVSWNSGALTSGVHTFPAVLQSSGLYSLSSVVTVPSSSLGTQTYICNVNHKPSNTKVDKKVEPKSCDKTHTCPPCPAPELLGGPSVFLFPPKPKDTLMISRTPEVTCVVVDVSHEDPEVKFNWYVDGVEVHNAKTKPREEQYNSTYRVVSVLTVLHQDWLNGKEYKCKVSNKALPAPIEKTISKAKGQPREPQVYTLPPSRDELTKNQVSLTCLVKGFYPSDIAVEWESNGQPENNYKTTPPVLDSDGSFFLYSKLTVDKSRWQQGNVFSCSVMHEALHNHYTQKSLSLSPGK

SEQ ID NO: 405 - protein, 214 aa, synthetic construct
EIVMTQSPSSLSASVGDRVTITCRASQSISSYLNWYQQKPGKAPKLLIYAASSLQSGVPSRFSGSGSGTDFTLTISSLQPEDFATYYCQQSYSTPLTFGGGTKVDIKRTVAAPSVFIFPPSDEQLKSGTASVVCLLNNFYPREAKVQWKVDNALQSGNSQESVTEQDSKDSTYSLSSTLTLSKADYEKHKVYACEVTHQGLSSPVTKSFNRGEC

SEQ ID NO: 406 - protein, 8 aa, synthetic construct
GFTFSSYS

SEQ ID NO: 407 - protein, 8 aa, synthetic construct
IGTISSYI

SEQ ID NO: 408 - protein, 11 aa, synthetic construct
ARDYYGGLFDY

SEQ ID NO: 409 - protein, 6 aa, synthetic construct
QSISSY

SEQ ID NO: 410 - protein, 9 aa, synthetic construct
QQSYSTPLT

SEQ ID NO: 411 - protein, 25 aa, synthetic construct
QVQLQESGGGLVKPGGSLRLSCAAS

SEQ ID NO: 412 - protein, 17 aa, synthetic construct
MNWVRQAPGKGLEWVSS

SEQ ID NO: 413 - protein, 38 aa, synthetic construct
YYADSVKGRFTISRDNAKNSLYLQMNSLRAEDTAVYYC

SEQ ID NO: 414 - protein, 11 aa, synthetic construct
WGQGTLVTVSS

SEQ ID NO: 415 - protein, 26 aa, synthetic construct
EIVMTQSPSSLSASVGDRVTITCRAS

SEQ ID NO: 416 - protein, 17 aa, synthetic construct
LNWYQQKPGKAPKLLIY

SEQ ID NO: 417 - protein, 36 aa, synthetic construct
SLQSGVPSRFSGSGSGTDFTLTISSLQPEDFATYYC

SEQ ID NO: 418 - protein, 13 aa, synthetic construct
FGGGTKVDIKRTV

SEQ ID NO: 419 - protein, 452 aa, synthetic construct
QVQLVQSGAAVKKPGESLKISCKGSGYRFTSYWIGWVRQMPGKGLEWMGIIYPGDSDTRYSPSFQGQVTISAGKSISTAYLQWSSLKASDTAMYYCARHGRGYNGYEGAFDIWGQGTMVTVSSASTKGPSVFPLAPSSKSTSGGTAALGCLVKDYFPEPVTVSWNSGALTSGVHTFPAVLQSSGLYSLSSVVTVPSSSLGTQTYICNVNHKPSNTKVDKKVEPKSCDKTHTCPPCPAPELLGGPSVFLFPPKPKDTLMISRTPEVTCVVVDVSHEDPEVKFNWYVDGVEVHNAKTKPREEQYNSTYRVVSVLTVLHQDWLNGKEYKCKVSNKALPAPIEKTISKAKGQPREPQVYTLPPSRDELTKNQVSLTCLVKGFYPSDIAVEWESNGQPENNYKTTPPVLDSDGSFFLYSKLTVDKSRWQQGNVFSCSVMHEALHNHYTQKSLSLSPG

SEQ ID NO: 420 - protein, 214 aa, synthetic construct
AIQLTQSPSSLSASVGDRVTITCRASQGISSALAWYQQKPGKAPKLLIYDASSLESGVPSRFSGSGSGTDFTLTISSLQPEDFATYYCQQFNSYPLTFGGGTKVEIKRTVAAPSVFIFPPSDEQLKSGTASVVCLLNNFYPREAKVQWKVDNALQSGNSQESVTEQDSKDSTYSLSSTLTLSKADYEKHKVYACEVTHQGLSSPVTKSFNRGEC

SEQ ID NO: 421 - protein, 8 aa, synthetic construct
GYRFTSYW

SEQ ID NO: 422 - protein, 8 aa, synthetic construct
IYPGDSDT

SEQ ID NO: 423 - protein, 16 aa, synthetic construct
ARHGRGYNGYEGAFDI

SEQ ID NO: 424 - protein, 6 aa, synthetic construct
QGISSA

SEQ ID NO: 425 - protein, 9 aa, synthetic construct
QQFNSYPLT

SEQ ID NO: 426 - protein, 25 aa, synthetic construct
QVQLVQSGAAVKKPGESLKISCKGS

SEQ ID NO: 427 - protein, 17 aa, synthetic construct
IGWVRQMPGKGLEWMGI

SEQ ID NO: 428 - protein, 38 aa, synthetic construct
RYSPSFQGQVTISAGKSISTAYLQWSSLKASDTAMYYC

SEQ ID NO: 429 - protein, 11 aa, synthetic construct
WGQGTMVTVSS

SEQ ID NO: 430 - protein, 26 aa, synthetic construct
AIQLTQSPSSLSASVGDRVTITCRAS

SEQ ID NO: 431 - protein, 17 aa, synthetic construct
LAWYQQKPGKAPKLLIY

SEQ ID NO: 432 - protein, 36 aa, synthetic construct
SLESGVPSRFSGSGSGTDFTLTISSLQPEDFATYYC

SEQ ID NO: 433 - protein, 13 aa, synthetic construct
FGGGTKVEIKRTV

SEQ ID NO: 434 - protein, 457 aa, synthetic construct
EVQLVESGGGLVQPGRSLRLSCAASGFTFDDYAMHWVRQAPGKGLEWVSGISWNSGSIGYADSVKGRFTISRDNAKNSLYLQMNSLRAEDTALYYCAKDTPLGYCSTTSCYGAFDIWGQGTMVTVSSASTKGPSVFPLAPSSKSTSGGTAALGCLVKDYFPEPVTVSWNSGALTSGVHTFPAVLQSSGLYSLSSVVTVPSSSLGTQTYICNVNHKPSNTKVDKKVEPKSCDKTHTCPPCPAPELLGGPSVFLFPPKPKDTLMISRTPEVTCVVVDVSHEDPEVKFNWYVDGVEVHNAKTKPREEQYNSTYRVVSVLTVLHQDWLNGKEYKCKVSNKALPAPIEKTISKAKGQPREPQVYTLPPSRDELTKNQVSLTCLVKGFYPSDIAVEWESNGQPENNYKTTPPVLDSDGSFFLYSKLTVDKSRWQQGNVFSCSVMHEALHNHYTQKSLSLSPGK

SEQ ID NO: 435 - protein, 215 aa, synthetic construct
EIVLAQSPGTLSLSPGERATLSCRASQSVSSSYLAWYQQKPGQAPRLLIYGASSRATGIPDRFSGSGSGTDFTLTISRLEPEDFAVYYCQQYGSSPLTFGGGTKLEIKRTVAAPSVFIFPPSDEQLKSGTASVVCLLNNFYPREAKVQWKVDNALQSGNSQESVTEQDSKDSTYSLSSTLTLSKADYEKHKVYACEVTHQGLSSPVTKSFNRGEC

SEQ ID NO: 436 - protein, 8 aa, synthetic construct
GFTFDDYA

SEQ ID NO: 437 - protein, 8 aa, synthetic construct
ISWNSGSI

SEQ ID NO: 438 - protein, 20 aa, synthetic construct
AKDTPLGYCSTTSCYGAFDI

SEQ ID NO: 439 - protein, 7 aa, synthetic construct
QSVSSSY

SEQ ID NO: 440 - protein, 9 aa, synthetic construct
QQYGSSPLT

SEQ ID NO: 441 - protein, 24 aa, synthetic construct
EVQLVESGGGLVQPGRSLRLSCAA

SEQ ID NO: 442 - protein, 17 aa, synthetic construct
MHWVRQAPGKGLEWVSG

SEQ ID NO: 443 - protein, 38 aa, synthetic construct
GYADSVKGRFTISRDNAKNSLYLQMNSLRAEDTALYYC

SEQ ID NO: 444 - protein, 11 aa, synthetic construct
WGQGTMVTVSS

SEQ ID NO: 445 - protein, 26 aa, synthetic construct
EIVLAQSPGTLSLSPGERATLSCRAS

SEQ ID NO: 446 - protein, 17 aa, synthetic construct
LAWYQQKPGQAPRLLIY

SEQ ID NO: 447 - protein, 36 aa, synthetic construct [sequence omitted]

SEQ ID NO: 448 - protein, 13 aa, synthetic construct
FGGGTKLEIKRTV

SEQ ID NO: 449 - protein, 457 aa, synthetic construct
EVQLVESGGGLVQPGRSLRLSCSASGFTFDDYAMHWVRQAPGKGLEWVSGISWNSGTIGYADSVKGRFTISRDNAKNSLYLQMNSLRAEDTALYYCAKDSPPGYCSSASCYGAFDIWGQGTTVTVSSASTKGPSVFPLAPSSKSTSGGTAALGCLVKDYFPEPVTVSWNSGALTSGVHTFPAVLQSSGLYSLSSVVTVPSSSLGTQTYICNVNHKPSNTKVDKKVEPKSCDKTHTCPPCPAPELLGGPSVFLFPPKPKDTLMISRTPEVTCVVVDVSHEDPEVKFNWYVDGVEVHNAKTKPREEQYNSTYRVVSVLTVLHQDWLNGKEYKCKVSNKALPAPIEKTISKAKGQPREPQVYTLPPSRDELTKNQVSLTCLVKGFYPSDIAVEWESNGQPENNYKTTPPVLDSDGSFFLYSKLTVDKSRWQQGNVFSCSVMHEALHNHYTQKSLSLSPGK

SEQ ID NO: 450 - protein, 214 aa, synthetic construct
DIQLTQSPSSLSASVGDRVTITCRASQSISSYLNWYQQKPGKAPKLLIYAASSLQSGVPSRFSGSGSGTDFTLTINSLQPEDFATYYCQQSYSTPFTFGPGTKVEIKRTVAAPSVFIFPPSDEQLKSGTASVVCLLNNFYPREAKVQWKVDNALQSGNSQESVTEQDSKDSTYSLSSTLTLSKADYEKHKVYACEVTHQGLSSPVTKSFNRGEC

SEQ ID NO: 451 - protein, 8 aa, synthetic construct
GFTFDDYA

SEQ ID NO: 452 - protein, 8 aa, synthetic construct
ISWNSGTI

SEQ ID NO: 453 - protein, 20 aa, synthetic construct
AKDSPPGYCSSASCYGAFDI

SEQ ID NO: 454 - protein, 6 aa, synthetic construct
QSISSY

SEQ ID NO: 455 - protein, 9 aa, synthetic construct
QQSYSTPFT

SEQ ID NO: 456 - protein, 25 aa, synthetic construct
EVQLVESGGGLVQPGRSLRLSCSAS

SEQ ID NO: 457 - protein, 17 aa, synthetic construct
MHWVRQAPGKGLEWVSG

SEQ ID NO: 458 - protein, 38 aa, synthetic construct; identical to SEQ ID NO: 443

SEQ ID NO: 459 - protein, 11 aa, synthetic construct
WGQGTTVTVSS

SEQ ID NO: 460 - protein, 26 aa, synthetic construct [sequence omitted]

SEQ ID NO: 461 - protein, 17 aa, synthetic construct
LNWYQQKPGKAPKLLIY

SEQ ID NO: 462 - protein, 36 aa, synthetic construct
SLQSGVPSRFSGSGSGTDFTLTINSLQPEDFATYYC

SEQ ID NO: 463 - protein, 13 aa, synthetic construct
FGPGTKVEIKRTV

SEQ ID NO: 464 - protein, 452 aa, synthetic construct
EVQLVESGGGVVRPGGSLRLSCAASGFTFDDYGMSWVRQAPGKGLEWVSDINWNGGSTGYADSVKGRFTISRDNAKNSLYLQMNSLRAEDTALYYCARESWDGSGIYYMDVWGKGTTVTVSSASTKGPSVFPLAPSSKSTSGGTAALGCLVKDYFPEPVTVSWNSGALTSGVHTFPAVLQSSGLYSLSSVVTVPSSSLGTQTYICNVNHKPSNTKVDKKVEPKSCDKTHTCPPCPAPELLGGPSVFLFPPKPKDTLMISRTPEVTCVVVDVSHEDPEVKFNWYVDGVEVHNAKTKPREEQYNSTYRVVSVLTVLHQDWLNGKEYKCKVSNKALPAPIEKTISKAKGQPREPQVYTLPPSRDELTKNQVSLTCLVKGFYPSDIAVEWESNGQPENNYKTTPPVLDSDGSFFLYSKLTVDKSRWQQGNVFSCSVMHEALHNHYTQKSLSLSPGK

SEQ ID NO: 465 - protein, 214 aa, synthetic construct
DIVMTQSPSFLSASVGDRVTITCRASQGISSYLNWYQQKPGKAPKLLIYAASTLQNGVPSRFSGSGSGTDFTLTISSLQPEDFATYYCQQSYSTPITFGQGTRLEIKRTVAAPSVFIFPPSDEQLKSGTASVVCLLNNFYPREAKVQWKVDNALQSGNSQESVTEQDSKDSTYSLSSTLTLSKADYEKHKVYACEVTHQGLSSPVTKSFNRGEC

SEQ ID NO: 466 - protein, 8 aa, synthetic construct
GFTFDDYG

SEQ ID NO: 467 - protein, 8 aa, synthetic construct
INWNGGST

SEQ ID NO: 468 - protein, 15 aa, synthetic construct
ARESWDGSGIYYMDV

SEQ ID NO: 469 - protein, 6 aa, synthetic construct
QGISSY

SEQ ID NO: 470 - protein, 9 aa, synthetic construct
QQSYSTPIT

SEQ ID NO: 471 - protein, 25 aa, synthetic construct
EVQLVESGGGVVRPGGSLRLSCAAS

SEQ ID NO: 472 - protein, 17 aa, synthetic construct
MSWVRQAPGKGLEWVSD

SEQ ID NO: 473 - protein, 38 aa, synthetic construct; identical to SEQ ID NO: 443

SEQ ID NO: 474 - protein, 11 aa, synthetic construct
WGKGTTVTVSS

SEQ ID NO: 475 - protein, 26 aa, synthetic construct
DIVMTQSPSFLSASVGDRVTITCRAS

SEQ ID NO: 476 - protein, 17 aa, synthetic construct
LNWYQQKPGKAPKLLIY

SEQ ID NO: 477 - protein, 36 aa, synthetic construct
TLQNGVPSRFSGSGSGTDFTLTISSLQPEDFATYYC

SEQ ID NO: 478 - protein, 13 aa, synthetic construct
FGQGTRLEIKRTV

SEQ ID NO: 479 - protein, 452 aa, synthetic construct
EVQLVESGGGVVRPGGSLRLSCAASGFTFDDYGMSWVRQAPGKGLEWVSGINWNGGSTGYADSVKGRFTISRDNAKNSLHLQMNSLRAEDTALYYCARESWNYEGYYYMDVWGKGTTVTVSSASTKGPSVFPLAPSSKSTSGGTAALGCLVKDYFPEPVTVSWNSGALTSGVHTFPAVLQSSGLYSLSSVVTVPSSSLGTQTYICNVNHKPSNTKVDKKVEPKSCDKTHTCPPCPAPELLGGPSVFLFPPKPKDTLMISRTPEVTCVVVDVSHEDPEVKFNWYVDGVEVHNAKTKPREEQYNSTYRVVSVLTVLHQDWLNGKEYKCKVSNKALPAPIEKTISKAKGQPREPQVYTLPPSRDELTKNQVSLTCLVKGFYPSDIAVEWESNGQPENNYKTTPPVLDSDGSFFLYSKLTVDKSRWQQGNVFSCSVMHEALHNHYTQKSLSLSPGK

SEQ ID NO: 480 - protein, 214 aa, synthetic construct
AIQMTQSPSFLSASVGDRVTITCRASQGISSYLAWYQQKPGKAPKLLIYAASTLQNGVPSRFSGSGSGTEFTLTISSLQPEDFATYYCQQLNSYPYTFGQGTKLEIKRTVAAPSVFIFPPSDEQLKSGTASVVCLLNNFYPREAKVQWKVDNALQSGNSQESVTEQDSKDSTYSLSSTLTLSKADYEKHKVYACEVTHQGLSSPVTKSFNRGEC

SEQ ID NO: 481 - protein, 8 aa, synthetic construct
GFTFDDYG

SEQ ID NO: 482 - protein, 8 aa, synthetic construct
INWNGGST

SEQ ID NO: 483 - protein, 15 aa, synthetic construct
ARESWNYEGYYYMDV

SEQ ID NO: 484 - protein, 6 aa, synthetic construct
QGISSY

SEQ ID NO: 485 - protein, 9 aa, synthetic construct
QQLNSYPYT

SEQ ID NO: 486 - protein, 25 aa, synthetic construct
EVQLVESGGGVVRPGGSLRLSCAAS

SEQ ID NO: 487 - protein, 17 aa, synthetic construct
MSWVRQAPGKGLEWVSG

SEQ ID NO: 488 - protein, 38 aa, synthetic construct
GYADSVKGRFTISRDNAKNSLHLQMNSLRAEDTALYYC

SEQ ID NO: 489 - protein, 11 aa, synthetic construct
WGKGTTVTVSS

SEQ ID NO: 490 - protein, 26 aa, synthetic construct
AIQMTQSPSFLSASVGDRVTITCRAS

SEQ ID NO: 491 - protein, 17 aa, synthetic construct
LAWYQQKPGKAPKLLIY

SEQ ID NO: 492 - protein, 36 aa, synthetic construct
TLQNGVPSRFSGSGSGTEFTLTISSLQPEDFATYYC

SEQ ID NO: 493 - protein, 13 aa, synthetic construct
FGQGTKLEIKRTV

SEQ ID NO: 494 - protein, 147 aa, Homo sapiens
MVHLTPEEKSAVTALWGKVNVDEVGGEALGRLLVVYPWTQRFFESFGDLSTPDAVMGNPKVKAHGKKVLGAFSDGLAHLDNLKGTFATLSELHCDKLHVDPENFRLLGNVLVCVLAHHFGKEFTPPVQAAYQKVVAGVANALAHKYH

SEQ ID NO: 495 - DNA, 628 bp, Homo sapiens
  source 1..628: mol_type = genomic DNA
acatttgcttctgacacaactgtgttcactagcaacctcaaacagacaccatggtgcatctgactcctgaggagaagtctgccgttactgccctgtggggcaaggtgaacgtggatgaagttggtggtgaggccctgggcaggctgctggtggtctacccttggacccagaggttctttgagtcctttggggatctgtccactcctgatgctgttatgggcaaccctaaggtgaaggctcatggcaagaaagtgctcggtgcctttagtgatggcctggctcacctggacaacctcaagggcacctttgccacactgagtgagctgcactgtgacaagctgcacgtggatcctgagaacttcaggctcctgggcaacgtgctggtctgtgtgctggcccatcactttggcaaagaattcaccccaccagtgcaggctgcctatcagaaagtggtggctggtgtggctaatgccctggcccacaagtatcactaagctcgctttcttgctgtccaatttctattaaaggttcctttgttccctaagtccaactactaaactgggggatattatgaagggccttgagcatctggattctgcctaataaaaaacatttattttcattgcaa

SEQ ID NO: 496 - protein, 147 aa, Homo sapiens
MGHFTEEDKATITSLWGKVNVEDAGGETLGRLLVVYPWTQRFFDSFGNLSSASAIMGNPKVKAHGKKVLTSLGDAIKHLDDLKGTFAQLSELHCDKLHVDPENFKLLGNVLVTVLAIHFGKEFTPEVQASWQKMVTAVASALSSRYH

SEQ ID NO: 497 - DNA, 11382 bp, Homo sapiens
  source 1..11382: mol_type = genomic DNA
ccttctcacttgggtaggctctgtcagagggaaagtctaggcctcaaggctgagacttttgtcccatgaggtgttcccttgatgtagcacagtcccccttttcctaggcgtggggcttcctgagagccgaactgtagtgattgttatctctcttctggatctagccacccatcaggtctaccagactccaggctggtactggggtttgtctgcacagagtcttgtgacgtgaaccatctgtgggtctctcagccatagatacaaccacctgctccaatggaggtggcagaggatgaaatggactctgtgagggtccttacttttggttgttcaatgcactatttttgtgctggttggcctcctgccaggaggtggcactttctagaaagcatcagcagaggcagtcaggtggtggtggctgggggggctggggcaccctagaactcccaagaatatatgccctttgtcttcagctaccagggtgagtaaggaaggaccatcaggtgggggcaggactagtcgtgtctgagctcagagtctccttgggcaggtctttctgtggctactgtgggaggatgggggtgtagtttccaggtcaatggatttatgttcctaggacaattatggctgcctctgctgtgtcatgcaggtcatcaggaaagtgggggaaagcaagcagtcacgtgacttgcccagctcccatgcaactcaaaaggttggtctcacttccagcgtgcaccctcccccgcaacagcaccgaatctgtttccatgcagtcagtgagcaaggctgagaacttgccccaggctaccagctgcgaaaccaagtagggctgtcctacttccctgccagtggagtctgcacaccaaattcatgtccccccaccaacccccccactgcccagcccctagatctggccaggtggagattttctttttcctgtcatcttttcccagttcctctggcagccctcccaaatgacccctgtgaggcaaggcagaaatggcttcctaggggacccagagagcccacagggcttttcccgctgcttcctctacccctgtattttgcttggccctctaaattgactcagctccaggtaaggtcagaatcttctcctgtggtctagatcttcaggttccccagtgaggatgtgtgtttgggggtagacggtcccccttttccacttccacagtttgggcactcacaatatttggggtgtttcccgggtcctgcaggagcaatctgcttctttcagagggtgtgtgcgttctctcagctttcttgatttatttctgcaggtggttctgcaaaaaaaattcctgatgggagacttcacatgctgctctgtgcatccgagtgggagctgcaatgtacttctgctgcctcccatctgccatcaccctctaatttgtcggtaatatgcatttttaatcaatctttttttctctctctctctttttcttctcccccaaaactatactgccctttgatatcaaggaatcaaggacgtgatgttgaggggtgggcagtggatacactctttaccccttagggagctatatctagatttagatattgccaattcaagataacttaattgaaagcaaattcataatgaatacacacacacacacacacatctgcatgacaagatttttaatagttgaaagaataactaataattgtccacaggcaataagggctttttaagcaaaacagttgtgataaacaggtcattcttagaatagtaatccagccaatagtacaggttgcttagagattatgtcattaccagagttaaaattctataatggcttctcactccctaccactgaggacaagtttatgtccttaggtttatgcttccctgaaacaataccacctgctattctccactttacatatcaacggcactggttctttatctaactctctggcacagcaggagtttgttttcttctgcttcagagctttgaatttactatttcagcttctaaactttatttggcaatgccttcccatggcagattccttctgtcattttgcctctgttcgaatactttctccttaatttcattcttagttaataatatctgaaattattttgttgtttaacttaattattaattttatgtatgttctacctagattataatcttcagaggaaagttttattctctgacttatttaacttaaatgcccactactttaaaaattatgacatttatttaacagatatttgctgaacaaatgtttgaaaatacatgggaaagaatgcttgaaaacacttgaaattgcttgtgtaaagaaacagttttatcagttaggatttaatcaatgtcagaagcaatgatataggaaaaatcgaggaataagacagttatggataaggagaaatcaacaaactcttaaaagatattgcctcaaaagcataagaggaaataagggtttatacatgacttttagaacactgccttggtttttggataaatggggaagttgtttgaaaacaggagggatcctagatattccttagtctgaggaggagcaattaagattcacttgtttagaggctgggagtggtggctcacgcctgtaatcccagaattttgggaggccaaggcaggcagatcacctgaggtcaagagttcaagaccaacctggccaacatggtgaaatcccatctctacaaaaatacaaaaattagacaggcatgatggcaagtgcctgtaatcccagctacttgggaggctgaggaaggagaattgcttgaacctggaaggcaggagttgcagtgagccgagatcataccactgcactccagcctgggtgacagaacaagactctgtctcaaaaaaaaaaaagagagattcaaaagattcacttgtttaggccttagcgggcttagacaccagtctctgacacattcttaaaggtcaggctctacaaatggaacccaaccagactctcagatatggccaaagatctatacacacccatctcacagatcccctatcttaaagagaccctaatttgggttcacctcagtctctataatctgtaccagcataccaataaaaatctttctcacccatccttagattgagagaagtcacttattattatgtgagtaactggaagatactgataagttgacaaatctttttctttcctttcttattcaacttttattttaacttccaaagaacaagtgcaatatgtgcagctttgttgcgcaggtcaacatgtatctttctggtcttttagccgcctaacactttgagcagatataagccttacacaggattatgaagtctgaaaggattccaccaatattattataattcctatcaacctgataggttaggggaaggtagagctctcctccaataagccagatttccagagtttctgacgtcataatctaccaaggtcatggatcgagttcagagaaaaaacaaaagcaaaaccaaacctaccaaaaaataaaaatcccaaagaaaaaataaagaaaaaaacagcatgaatacttcctgccatgttaagtggccaatatgtcagaaacagcactgagttacagataaagatgtctaaactacagtgacatcccagctgtcacagtgtgtggactattagtcaataaaacagtccctgcctcttaagagttgttttccatgcaaatacatgtcttatgtcttagaataagattccctaagaagtgaacctagcatttatacaagataattaattctaatccatagtatctggtaaagagcattctaccatcatctttaccgagcatagaagagctacaccaaaaccctgggtcatcagccagcacatacacttatccagtgataaatacacatcatcgggtgcctacatacatacctgaatataaaaaaaatacttttgctgagatgaaacaggcgtgatttatttcaaataggtacggataagtagatattgaagtaaggattcagtcttatattatattacataacattaatctattcctgcactgaaactgttgctttataggatttttcactacactaatgagaacttaagagataatggcctaaaaccacagagagtatattcaaagataagtatagcacttcttatttggaaaccaatgcttactaaatgagactaagacgtgtcccatcaaaaatcctggacctatgcctaaaacacatttcacaatccctgaacttttcaaaaattggtacatgctttaactttaaactacaggcctcactggagctacagacaagaaggtgaaaaacggctgacaaaagaagtcctggtatcttctatggtgggagaagaaaactagctaaagggaagaataaattagagaaaaattggaatgactgaatcggaacaaggcaaaggctataaaaaaaattaagcagcagtatcctcttgggggccccttccccacactatctcaatgcaaatatctgtctgaaacggtccctggctaaactccacccatgggttggccagccttgccttgaccaatagccttgacaaggcaaacttgaccaatagtcttagagtatccagtgaggccaggggccggcggctggctagggatgaagaataaaaggaagcacccttcagcagttccacacactcgcttctggaacgtctgaggttatcaataagctcctagtccagacgccatgggtcatttcacagaggaggacaaggctactatcacaagcctgtggggcaaggtgaatgtggaagatgctggaggagaaaccctgggaaggtaggctctggtgaccaggacaagggagggaaggaaggaccctgtgcctggcaaaagtccaggtcgcttctcaggatttgtggcaccttctgactgtcaaactgttcttgtcaatctcacaggctcctggttgtctacccatggacccagaggttctttgacagctttggcaacctgtcctctgcctctgccatcatgggcaaccccaaagtcaaggcacatggcaagaaggtgctgacttccttgggagatgccataaagcacctggatgatctcaagggcacctttgcccagctgagtgaactgcactgtgacaagctgcatgtggatcctgagaacttcaaggtgagtccaggagatgtttcagcactgttgcctttagtctcgaggcaacttagacaactgagtattgatctgagcacagcagggtgtgagctgtttgaagatactggggttgggagtgaagaaactgcagaggactaactgggctgagacccagtggcaatgttttagggcctaaggagtgcctctgaaaatctagatggacaactttgactttgagaaaagagaggtggaaatgaggaaaatgacttttctttattagatttcggtagaaagaactttcacctttcccctatttttgttattcgttttaaaacatctatctggaggcaggacaagtatggtcattaaaaagatgcaggcagaaggcatatattggctcagtcaaagtggggaactttggtggccaaacatacattgctaaggctattcctatatcagctggacacatataaaatgctgctaatgcttcattacaaacttatatcctttaattccagatgggggcaaagtatgtccaggggtgaggaacaattgaaacatttgggctggagtagattttgaaagtcagctctgtgtgtgtgtgtgtgtgtgtgcgcgcgtgtgtttgtgtgtgtgtgagagcgtgtgtttcttttaacgttttcagcctacagcatacagggttcatggtggcaagaagataacaagatttaaattatggccagtgactagtgctgcaagaagaacaactacctgcatttaatgggaaagcaaaatctcaggctttgagggaagttaacataggcttgattctgggtggaagcttggtgtgtagttatctggaggccaggctggagctctcagctcactatgggttcatctttattgtctcctttcatctcaacagctcctgggaaatgtgctggtgaccgttttggcaatccatttcggcaaagaattcacccctgaggtgcaggcttcctggcagaagatggtgactggagtggccagtgccctgtcctccagataccactgagctcactgcccatgatgcagagctttcaaggataggctttattctgcaagcaatcaaataataaatctattctgctaagagatcacacatggttgtcttcagttctttttttatgtctttttaaatatatgagccacaaagggttttatgttgagggatgtgtttatgtgtatttatacatggctatgtgtgtttgtgtcatgtgcacactccacacttttttgtttacgttagatgtgggttttgatgagcaaataaaagaactaggcaataaagaaacttgtacatgggagttctgcaagtgggagtaaaaggtgcaggagaaatctggttggaagaaagacctctataggacaggactcctcagaaacagatgttttggaagagatggggaaaggttcagtgaagggggctgaacccccttccctggattgcagcacagcagcgaggaaggggctcaacgaagaaaaagtgttccaagctttaggaagtcaaggtttaggcagggatagccattctattttattaggggcaatactatttccaacggcatctggcttttctcagcccttgtgaggctctacagggaggttgaggtgttagagatcagagcaggaaacaggtttttctttccacggtaactacaatgaagtgatccttactttactaaggaacttttcattttaagtgttgacgcatgcctaaagaggtgaaattaatcccatacccttaagtctacagactggtcacagcatttcaaggaggagacctcattgtaagcttctagggaggtggggacttaggtgaaggaaatgagccagcagaagctcacaagtcagcatcagcgtgtcatgtctcagcagcagaacagcacggtcagatgaaaatatagtgtgaagaatttgtataacattaattgagaaggcagattcactggagttcttatataattgaaagttaatgcacgttaataagcaagagtttagtttaatgtgatggtgttatgaacttaacgcttgtgtctccagaaaattcacatgctgaatccccaactcccaattggctccatttgtgggggaggctttggaaaagtaatcaggtttagaggagctcatgagagcagatccccatcatagaattattttcctcatcagaagcagagagattagccatttctcttccttctggtgaggacacagtgggaagtcagccacctgcaacccaggaagagagccctgaccaggaaccagcagaaaagtgagaaaaaatcctgttgttgaagtcacccagtctatgctattttgttatagcaccttgcactaagtaaggcagatgaagaaagagaaaaaaataagcttcggtgttcagtggattagaaaccatgtttatctcaggtttacaaatctccacttgtcctctgtgtttcagaataaaataccaactctactactctcatctgtaagatgcaaatagtaagcctgagcccttctgtctaactttgaattctattttttcttcaacgtactttaggcttgtaatgtgtttatatacagtgaaatgtcaagttctttctttatatttctttctttcttttttttcctcagcctcagagttttccacatgcccttcctactttcaggaacttctttctccaaacgtcttctgcctggctccatcaaatcataaaggacccacttcaaatgccatcactcactaccatttcacaattcgcactttctttctttgtcctttttttttttagtaaaacaagtttataaaaaattgaaggaataaatgaatggctacttcataggcagagtagacgcaagggctactggttgccgatttttattgttatttttcaatagtatgctaaacaaggggtagattatttatgctgcccatttttagaccataaaagataacttcctgatgttgccatggcatttttttccttttaattttatttcatttcattttaatttcgaaggtacatgtgcaggatgtgcaggcttgttacatgggtaaatgtgtgtctttctggccttttagccatctgtatcaatgagcagatataagctttacacaggatcatgaaggatgaaagaatttcaccaatattataataatttcaatcaacctgatagcttaggggataaactaatttgaagatacagcttgcctccgataagccagaattccagagcttctggcattataatctagcaaggttagagatcatggatcactttcagagaaaaacaaaaacaaactaaccaaaagcaaaacagaaccaaaaaaccaccataaatacttcctaccctgttaatggtccaatatgtcagaaacagcactgtgttagaaataaagctgtctaaagtacactaatattcgagttataatagtgtgtggactattagtcaataaaaacaacccttgcctctttagagttgttttccatgtacacgcacatcttatgtcttagagtaagattccctgagaagtgaacctagcatttatacaagataattaattctaatccacagtacctgccaaagaacattctaccatcatctttactgagcatagaagagctacgccaaaaccctgggtcatcagccagcacacacacttatccagtggtaaatacacatcatctggtgtatacatacatacctgaatatggaatcaaatatttttctaagatgaaacagtcatgatttatttcaaataggtacggataagtagatattgaggtaagcattaggtcttatattatgtaacactaatctattactgcgctgaaactgtggctttatagaaattgttttcactgcactattgagaaattaagagataatggcaaaagtcacaaagagtatattcaaaaagaagtatagcactttttccttagaaaccactgctaactgaaagagactaagatttgtcccgtcaaaaatcctggacctatgcctaaaacacatttcacaatccctgaacttttcaaaaattggtacatgctttagctttaaactacaggcctcactggagctagagacaagaaggtaaaaaacggctgacaaaagaagtcctggtatcctctatgatgggagaaggaaactagctaaagggaagaataaattagagaaaaactggaatgactgaatcggaacaaggcaaaggctataaaaaaaattagcagtatcctcttgggggccccttccccacactatctcaatgcaaatatctgtctgaaacggtccctggctaaactccacccatgggttggccagccttgccttgaccaatagccttgacaaggcaaacttgaccaatagtcttagagtatccagtgaggccaggggccggcggctggctagggatgaagaataaaaggaagcacccttcagcagttccacacactcgcttctggaacgtctgaggttatcaataagctcctagtccagacgccatgggtcatttcacagaggaggacaaggctactatcacaagcctgtggggcaaggtgaatgtggaagatgctggaggagaaaccctgggaaggtaggctctggtgaccaggacaagggagggaaggaaggaccctgtgcctggcaaaagtccaggtcgcttctcaggatttgtggcaccttctgactgtcaaactgttcttgtcaatctcacaggctcctggttgtctacccatggacccagaggttctttgacagctttggcaacctgtcctctgcctctgccatcatgggcaaccccaaagtcaaggcacatggcaagaaggtgctgacttccttgggagatgccacaaagcacctggatgatctcaagggcacctttgcccagctgagtgaactgcactgtgacaagctgcatgtggatcctgagaacttcaaggtgagtccaggagatgtttcagccctgttgcctttagtctcgaggcaacttagacaacggagtattgatctgagcacagcagggtgtgagctgtttgaagatactggggttgggggtgaagaaactgcagaggactaactgggctgagacccagtggtaatgttttagggcctaaggagtgcctctaaaaatctagatggacaattttgactttgagaaaagagaggtggaaatgaggaaaatgacttttctttattagattccagtagaaagaactttcatctttccctcatttttgttgttttaaaacatctatctggaggcaggacaagtatggtcgttaaaaagatgcaggcagaaggcatatattggctcagtcaaagtggggaactttggtggccaaacatacattgctaaggctattcctatatcagctggacacatataaaatgctgctaatgcttcattacaaacttatatcctttaattccagatgggggcaaagtatgtccaggggtgaggaacaattgaaacatttgggctggagtagattttgaaagtcagctctgtgtgtgtgtgtgtgtgtgcgcgcgcgcgtgtgtgtgtgtgtgtcagcgtgtgtttcttttaacgtcttcagcctacaacatacagggttcatggtggcaagaagatagcaagatttaaattatggccagtgactagtgcttgaaggggaacaactacctgcatttaatgggaaggcaaaatctcaggctttgagggaagttaacataggcttgattctgggtggaagcttggtgtgtagttatctggaggccaggctggagctctcagctcactatgggttcatctttattgtctcctttcatctcaacagctcctgggaaatgtgctggtgaccgttttggcaatccatttcggcaaagaattcacccctgaggtgcaggcttcctggcagaagatggtgactgcagtggccagtgccctgtcctccagataccactgagctcactgcccatgattcagagctttcaaggataggctttattctgcaagcaatacaaataataaatctattctgctgagagatcacacatgattttcttcagctcttttttttacatctttttaaatatatgagccacaaagggtttatattgagggaagtgtgtatgtgtatttctgcatgcctgtttgtgtttgtggtgtgtgcatgctcctcatttatttttatatgagatgtgcattttgatgagcaaataaaagcagtaaagacacttgtacacgggagttctgcaagtgggagtaaatggtgtaggag

SEQ ID NO: 498 - protein, 147 aa, Homo sapiens
MGHFTEEDKATITSLWGKVNVEDAGGETLGRLLVVYPWTQRFFDSFGNLSSASAIMGNPKVKAHGKKVLTSLGDAIKHLDDLKGTFAQLSELHCDKLHVDPENFKLLGNVLVTVLAIHFGKEFTPEVQASWQKMVTGVASALSSRYH

SEQ ID NO: 499 - protein, 976 aa, Homo sapiens [sequence omitted]

SEQ ID NO: 500 - DNA, 5190 bp, Homo sapiens
  source 1..5190: mol_type = genomic DNA
tctgggggctcggctttgccgcgctcgctgcacttgggcgagagctggaacgtggaccagagctcggatcccatcgcagctaccgcgatgagaggcgctcgcggcgcctgggattttctctgcgttctgctcctactgcttcgcgtccagacaggctcttctcaaccatctgtgagtccaggggaaccgtctccaccatccatccatccaggaaaatcagacttaatagtccgcgtgggcgacgagattaggctgttatgcactgatccgggctttgtcaaatggacttttgagatcctggatgaaacgaatgagaataagcagaatgaatggatcacggaaaaggcagaagccaccaacaccggcaaatacacgtgcaccaacaaacacggcttaagcaattccatttatgtgtttgttagagatcctgccaagcttttccttgttgaccgctccttgtatgggaaagaagacaacgacacgctggtccgctgtcctctcacagacccagaagtgaccaattattccctcaaggggtgccaggggaagcctcttcccaaggacttgaggtttattcctgaccccaaggcgggcatcatgatcaaaagtgtgaaacgcgcctaccatcggctctgtctgcattgttctgtggaccaggagggcaagtcagtgctgtcggaaaaattcatcctgaaagtgaggccagccttcaaagctgtgcctgttgtgtctgtgtccaaagcaagctatcttcttagggaaggggaagaattcacagtgacgtgcacaataaaagatgtgtctagttctgtgtactcaacgtggaaaagagaaaacagtcagactaaactacaggagaaatataatagctggcatcacggtgacttcaattatgaacgtcaggcaacgttgactatcagttcagcgagagttaatgattctggagtgttcatgtgttatgccaataatacttttggatcagcaaatgtcacaacaaccttggaagtagtagataaaggattcattaatatcttccccatgataaacactacagtatttgtaaacgatggagaaaatgtagatttgattgttgaatatgaagcattccccaaacctgaacaccagcagtggatctatatgaacagaaccttcactgataaatgggaagattatcccaagtctgagaatgaaagtaatatcagatacgtaagtgaacttcatctaacgagattaaaaggcaccgaaggaggcacttacacattcctagtgtccaattctgacgtcaatgctgccatagcatttaatgtttatgtgaatacaaaaccagaaatcctgacttacgacaggctcgtgaatggcatgctccaatgtgtggcagcaggattcccagagcccacaatagattggtatttttgtccaggaactgagcagagatgctctgcttctgtactgccagtggatgtgcagacactaaactcatctgggccaccgtttggaaagctagtggttcagagttctatagattctagtgcattcaagcacaatggcacggttgaatgtaaggcttacaacgatgtgggcaagacttctgcctattttaactttgcatttaaaggtaacaacaaagagcaaatccatccccacaccctgttcactcctttgctgattggtttcgtaatcgtagctggcatgatgtgcattattgtgatgattctgacctacaaatatttacagaaacccatgtatgaagtacagtggaaggttgttgaggagataaatggaaacaattatgtttacatagacccaacacaacttccttatgatcacaaatgggagtttcccagaaacaggctgagttttgggaaaaccctgggtgctggagctttcgggaaggttgttgaggcaactgcttatggcttaattaagtcagatgcggccatgactgtcgctgtaaagatgctcaagccgagtgcccatttgacagaacgggaagccctcatgtctgaactcaaagtcctgagttaccttggtaatcacatgaatattgtgaatctacttggagcctgcaccattggagggcccaccctggtcattacagaatattgttgctatggtgatcttttgaattttttgagaagaaaacgtgattcatttatttgttcaaagcaggaagatcatgcagaagctgcactttataagaatcttctgcattcaaaggagtcttcctgcagcgatagtactaatgagtacatggacatgaaacctggagtttcttatgttgtcccaaccaaggccgacaaaaggagatctgtgagaataggctcatacatagaaagagatgtgactcccgccatcatggaggatgacgagttggccctagacttagaagacttgctgagcttttcttaccaggtggcaaagggcatggctttcctcgcctccaagaattgtattcacagagacttggcagccagaaatatcctccttactcatggtcggatcacaaagatttgtgattttggtctagccagagacatcaagaatgattctaattatgtggttaaaggaaacgctcgactacctgtgaagtggatggcacctgaaagcattttcaactgtgtatacacgtttgaaagtgacgtctggtcctatgggatttttctttgggagctgttctctttaggaagcagcccctatcctggaatgccggtcgattctaagttctacaagatgatcaaggaaggcttccggatgctcagccctgaacacgcacctgctgaaatgtatgacataatgaagacttgctgggatgcagatcccctaaaaagaccaacattcaagcaaattgttcagctaattgagaagcagatttcagagagcaccaatcatatttactccaacttagcaaactgcagccccaaccgacagaagcccgtggtagaccattctgtgcggatcaattctgtcggcagcaccgcttcctcctcccagcctctgcttgtgcacgacgatgtctgagcagaatcagtgtttgggtcacccctccaggaatgatctcttcttttggcttccatgatggttattttcttttctttcaacttgcatccaactccaggatagtgggcaccccactgcaatcctgtctttctgagcacactttagtggccgatgatttttgtcatcagccaccatcctattgcaaaggttccaactgtatatattcccaatagcaacgtagcttctaccatgaacagaaaacattctgatttggaaaaagagagggaggtatggactgggggccagagtcctttccaaggcttctccaattctgcccaaaaatatggttgatagtttacctgaataaatggtagtaatcacagttggccttcagaaccatccatagtagtatgatgatacaagattagaagctgaaaacctaagtcctttatgtggaaaacagaacatcattagaacaaaggacagagtatgaacacctgggcttaagaaatctagtatttcatgctgggaatgagacataggccatgaaaaaaatgatccccaagtgtgaacaaaagatgctcttctgtggaccactgcatgagcttttatactaccgacctggtttttaaatagagtttgctattagagcattgaattggagagaaggcctccctagccagcacttgtatatacgcatctataaattgtccgtgttcatacatttgaggggaaaacaccataaggtttcgtttctgtatacaaccctggcattatgtccactgtgtatagaagtagattaagagccatataagtttgaaggaaacagttaataccattttttaaggaaacaatataaccacaaagcacagtttgaacaaaatctcctcttttagctgatgaacttattctgtagattctgtggaacaagcctatcagcttcagaatggcattgtactcaatggatttgatgctgtttgacaaagttactgattcactgcatggctcccacaggagtgggaaaacactgccatcttagtttggattcttatgtagcaggaaataaagtataggtttagcctccttcgcaggcatgtcctggacaccgggccagtatctatatatgtgtatgtacgtttgtatgtgtgtagacaaatatttggaggggtatttttgccctgagtccaagagggtcctttagtacctgaaaagtaacttggctttcattattagtactgctcttgtttcttttcacatagctgtctagagtagcttaccagaagcttccatagtggtgcagaggaagtggaaggcatcagtccctatgtatttgcagttcacctgcacttaaggcactctgttatttagactcatcttactgtacctgttccttagaccttccataatgctactgtctcactgaaacatttaaattttaccctttagactgtagcctggatattattcttgtagtttacctctttaaaaacaaaacaaaacaaaacaaaaaactccccttcctcactgcccaatataaaaggcaaatgtgtacatggcagagtttgtgtgttgtcttgaaagattcaggtatgttgcctttatggtttcccccttctacatttcttagactacatttagagaactgtggccgttatctggaagtaaccatttgcactggagttctatgctctcgcacctttccaaagttaacagattttggggttgtgttgtcacccaagagattgttgtttgccatactttgtctgaaaaattcctttgtgtttctattgacttcaatgatagtaagaaaagtggttgttagttatagatgtctaggtacttcaggggcacttcattgagagttttgtcttggatattcttgaaagtttatatttttataattttttcttacatcagatgtttctttgcagtggcttaatgtttgaaattattttgtggctttttttgtaaatattgaaatgtagcaataatgtcttttgaatattcccaagcccatgagtccttgaaaatattttttatatatacagtaactttatgtgtaaatacataagcggcgtaagtttaaaggatgttggtgttccacgtgttttattcctgtatgttgtccaattgttgacagttctgaagaattctaataaaatgtacatatataaatcaaaaaaaaaaaaaaaa

SEQ ID NO: 501 - protein, 273 aa, Homo sapiens
MKKTQTWILTCIYLQLLLFNPLVKTEGICRNRVTNNVKDVTKLVANLPKDYMITLKYVPGMDVLPSHCWISEMVVQLSDSLTDLLDKFSNISEGLSNYSIIDKLVNIVDDLVECVKENSSKDLKKSFKSPEPRLFTPEEFFRIFNRSIDAFKDFVVASETSDCVVSSTLSPEKDSRVSVTKPFMLPPVAASSLRNDSSSSNRKAKNPPGDSSLHWAAMALPALFSLIIGFAFGALYWKKRQPSLTRAVENIQINEEDNEISMLQEKEREFQEV

SEQ ID NO: 502 - DNA, 5376 bp, Homo sapiens
  source 1..5376: mol_type = genomic DNA
gggcttcgctcgccgcctcgcgccgagactagaagcgctgcgggaagcagggacagtggagagggcgctgcgctcgggctacccaatgcgtggactatctgccgccgctgttcgtgcaatatgctggagctccagaacagctaaacggagtcgccacaccactgtttgtgctggatcgcagcgctgcctttccttatgaagaagacacaaacttggattctcacttgcatttatcttcagctgctcctatttaatcctctcgtcaaaactgaagggatctgcaggaatcgtgtgactaataatgtaaaagacgtcactaaattggtggcaaatcttccaaaagactacatgataaccctcaaatatgtccccgggatggatgttttgccaagtcattgttggataagcgagatggtagtacaattgtcagacagcttgactgatcttctggacaagttttcaaatatttctgaaggcttgagtaattattccatcatagacaaacttgtgaatatagtggatgaccttgtggagtgcgtgaaagaaaactcatctaaggatctaaaaaaatcattcaagagcccagaacccaggctctttactcctgaagaattctttagaatttttaatagatccattgatgccttcaaggactttgtagtggcatctgaaactagtgattgtgtggtttcttcaacattaagtcctgagaaagggaaggccaaaaatccccctggagactccagcctacactgggcagccatggcattgccagcattgttttctcttataattggctttgcttttggagccttatactggaagaagagacagccaagtcttacaagggcagttgaaaatatacaaattaatgaagaggataatgagataagtatgttgcaagagaaagagagagagtttcaagaagtgtaattgtggcttgtatcaacactgttactttcgtacattggctggtaacagttcatgtttgcttcataaatgaagcagctttaaacaaattcatattctgtctggagtgacagaccacatctttatctgttcttgctacccatgactttatatggatgattcagaaattggaacagaatgttttactgtgaaactggcactgaattaatcatctataaagaagaacttgcatggagcaggactctattttaaggactgcgggacttgggtctcatttagaacttgcagctgatgttggaagagaaagcacgtgtctcagactgcatgtaccatttgcatggctccagaaatgtctaaatgctgaaaaaacacctagctttattcttcagatacaaactgcagcctgtagttatcctggtctctgcaagtagatttcagcttggatagtgagggtaacaatttttctcaaagggatctggaaaaaatgtttaaaactcagtagtgtcagccactgtacagtgtagaaagcagtgggaactgtgattggatttggcaacatgtcagctttatagttgccgattagtgatatgggtctgatttcgatctcttcctgatgtaaaccatgctcacccatatcccactatacaaatgcaaatggttgcctggttccatttatgcaagggagccagtactgaattatgccttggcagaggggagactccaaaagagtcatcgcaggaagaagttaagaacactgaacatcagaacagtctgccaagaaggacattggcatcctgggaaagtccgccttttcccttgaccactatagggtgtataaatcgtgtttgcaaaatgtgttatgatgtgtttatattctaaaactattacagagctatgtaaagggacttaggagaaaatgctgaatgtaagatggtcccatttcaatttccaccatgggagagcctaaaaataaattatgacatttagtatctaaggttagaaaaccacgcccacatgctaatatgggtgttgaaaactaggttacttataatgcaaggaatcaggaaactttagttatttatagtataatcaccattatctgtttaaaggatccatttagttaaaatcgggcactctatattcattaaggtttatgaattaaaaagaaagctttatgtagttatgcatgtcagtttgctatttaaaatgtgtgacagtgtttgtcatattaagagtgaatttggcaggaattcccaagatggacattgtgcttttaaactagaacttgtaagacattatgtgaatatcccttgccaattttttttataataagaaaacatctgactaaagtcaaagaatgatttcttatggtttattttgatgaaagttcttttaacatgtcttgaatgtacacataaaggaatccaaagctttccattctaacttaatctttgtgataacattattgccatgttctacaaccgtaagatgacagttttcaatgtagtgacacaaaagggcatgaaaaactaactgctagctttcctttcatttcaaaagtccaagaatttctagtatatttggattttagcttctgttcaaagcaaatccagatgcaactccagtaagtggcctttgctcttttttgtaccaaagagcccagatgattcctacagtccctttcttctctaacatgctgtggttccttaaatatgagtaatttctctaagatataacccaggtgctttgagaagctgcattaaggtgttcaggccctcagatatcacatggtacacttgattagtaataaaaccagagatcaatttaaattgctgataggtcctgtctcagtgtgtggcattgactgttttcaggaaaatagatacagattaatatgagttatgcgtgtaggttgtgtatagattgagaagatagatacttctcaatctagtagtttgatttatttaaccaatggtttcagtttgcttgagcatatgaaaatcctgcttaatgtgcttaagagtataataaatgtgtacttttgtcctcaaacctagtagctgggttttaacactcatggacatggtcttaatcaatggagttaaataaacaaattcagcaagttattaaatctgacatggtaggagaggggagatgtgtcctgcttattaaatgtgttggtccattgaaagttacatggattgccaatttttaaaacactaaagttgaataaaatgcatgaacaatagaaaaatgctgaacattattttggatgctagctgcttggacattaactgtgttatttctgctttgagatgaaaatatatatttatctttgcttattttatcccagatgtgttctgaatatccttcttcataaatcatggaaaactcactgctgagatagtaaaccatgaaatcgccttttcagttggtgccatgtatctgacagttccatcttggaaggtttcaaaattaccttttaaaatgatctcagaagtctgtagattctcaatgatactgaaagctttgcacctctttggtagaaaccaggtctatttagaaaatggctttatgataaatgttgcctcctgagtgataatgaagtgttcctggatattgtattgtaatttaatgtgcttaccacactgccacattttaatgagtcagagaaaaattaatttttcttcaatacaataatagaacaagtagcctattctcttaaaaagtatgtgaaaagaaaattatgaaaaaatatgcatacctaatgaagtattggttttagtaagaattaaatacatttcattgagctttaaagtactttggagaaactttggggcacgttttcctactctaattcaactaaagttataaataaagagaaaaactcattcagaaatcatggattttaaaaatattttactgcagccaagttttcatttcaaaatgtaatttcagtttggagcttttaggcattatgtatatttaaaaaatatattcttcaaaaatgcattttggcatggtgggatggatgttgcaaaagatatccggagcctccagtctgtcattaactgatatggtaaatcacctctcttctttgggtctcaattttttatttatctatatggtaaactcagagatcactccttaggggtgagtcctattgcaatatgaccgacaaagaagacaaaatagcattgaaactaacccatacaaaatatccaactctggattctgtgaataagtatcttgaccataaaaagtcattgctgttcttgtttctaatgtaaatagtgtccattagtaaaagtgaaattcagtcttaagtagggtgaattggatcaccatttacacaagagatggctttttcctttgcttgaataaacattttggatcacctccaaagaatgaaaaccagtagtacgttttagtcatattagtcaggatgagaaactataagatgtgtgtaacatttggaaatgcaccaaagtgagcgtttaaatcttctcattttattgaaaactaagagcagaaaatgtaaaatgctcatgaaggttttgaatgccaaaagatattttagaatcaatttataaaggggtaattcattaattacactttaaaattggaaagtgggataagaaatctaaagtaaaccagcttatctttgaaacaatattattttgaaattggctttaaaataaaaccattcagattgaaattctaattagctcatttgtggagtttgatcacacaattcataatgttgctgctttccattaactagtcttgaaatgcctttgtttgtaaaaataaaataatggtactttcattttataacaaggtgtttttttcaagaaataatccatgctaaaatggatatttgtgatcctgaaatgtttactaagcattgtaaatttatttataactgccatctccaactacatccttatgatgtttttaacaataaaattaaaacaactgttaaactaaaaaccacaccgttttccagtacttgatctctgagctacaatactcactaaatataattttccaatcaaaatattctattctatattctaagggttaatatgtgattatagtgtccacttgccaccatttttttaaatcaatggacttgaaaagtattaatttagatggatgcgcagatataccctcagttcagtcatagattggagtttgcatataataatgtaaatgtatgtcgacactattctaaatagttctattatgactgaaatttaattaaataaaaaaggttgtaaaatgtgatgtgtatgtgtatatactgtatgtgtactttttaaaataggtgtatgtcccaacccttttttatacaggtttgaatttaaaattacatgatatatacatatactttattgttctaaataaagaattttatgcactctcaaaaaaaaaaaaaaaaaa

SEQ ID NO: 503 - DNA, 23 bp, Homo sapiens
  source 1..23: mol_type = genomic DNA
cttgaccaatagccttgacaagg

SEQ ID NO: 504 - RNA, 20 nt, synthetic construct
  source 1..20: mol_type = other RNA
atgaaacgaatgagaataag

SEQ ID NO: 505 - RNA, 20 nt, synthetic construct
  source 1..20: mol_type = other RNA
tggatgaaacgaatgagaat

SEQ ID NO: 506 - RNA, 20 nt, synthetic construct
  source 1..20: mol_type = other RNA
gccaggggaagcctcttccc

SEQ ID NO: 507 - RNA, 20 nt, synthetic construct
  source 1..20: mol_type = other RNA
tctgtgtactcaacgtggaa

SEQ ID NO: 508 - RNA, 20 nt, synthetic construct
  source 1..20: mol_type = other RNA
tgtgtactcaacgtggaaaa

SEQ ID NO: 509 - RNA, 20 nt, synthetic construct
  source 1..20: mol_type = other RNA
gggaagattatcccaagtct

SEQ ID NO: 510 - RNA, 20 nt, synthetic construct
  source 1..20: mol_type = other RNA
ccagaaatcctgacttacga

SEQ ID NO: 511 - RNA, 20 nt, synthetic construct
  source 1..20: mol_type = other RNA
tctgagaatgaaagtaatat

SEQ ID NO: 512 - RNA, 20 nt, synthetic construct
  source 1..20: mol_type = other RNA
ctattttaactttgcattta

SEQ ID NO: 513 - RNA, 20 nt, synthetic construct
  source 1..20: mol_type = other RNA
ttcacgagcctgtcgtaagt

SEQ ID NO: 514 - RNA, 20 nt, synthetic construct
  source 1..20: mol_type = other RNA
cagcagtggatctatatgaa

SEQ ID NO: 515 - RNA, 20 nt, synthetic construct
  source 1..20: mol_type = other RNA
cattccccaaacctgaacac

SEQ ID NO: 516 - RNA, 20 nt, synthetic construct
  source 1..20: mol_type = other RNA
tatcccaagtctgagaatga

SEQ ID NO: 517 - RNA, 20 nt, synthetic construct
  source 1..20: mol_type = other RNA
ataaatgggaagattatccc

SEQ ID NO: 518 - RNA, 20 nt, synthetic construct
  source 1..20: mol_type = other RNA
tccccaaacctgaacaccag

SEQ ID NO: 519 - RNA, 20 nt, synthetic construct
  source 1..20: mol_type = other RNA
gccattcacgagcctgtcgt

SEQ ID NO: 520 - RNA, 20 nt, synthetic construct
  source 1..20: mol_type = other RNA
aaatgtcacaacaaccttgg

SEQ ID NO: 521 - RNA, 20 nt, synthetic construct
  source 1..20: mol_type = other RNA
cgtggaaaagagaaaacagt

SEQ ID NO: 522 - RNA, 20 nt, synthetic construct
  source 1..20: mol_type = other RNA
ccatttgacaaagcccggat

SEQ ID NO: 523 - RNA, 20 nt, synthetic construct
  source 1..20: mol_type = other RNA
agcaagctatcttcttaggg

SEQ ID NO: 524 - RNA, 20 nt, synthetic construct
  source 1..20: mol_type = other RNA
tgaggtttattcctgacccc

SEQ ID NO: 525 - RNA, 20 nt, synthetic construct
  source 1..20: mol_type = other RNA
tgaatggatcacggaaaagg

SEQ ID NO: 526 - RNA, 20 nt, synthetic construct
  source 1..20: mol_type = other RNA
ccactggcagtacagaagca

SEQ ID NO: 527 - RNA, 20 nt, synthetic construct
  source 1..20: mol_type = other RNA
agaatgaatggatcacggaa

SEQ ID NO: 528 - RNA, 20 nt, synthetic construct
  source 1..20: mol_type = other RNA
tgtaaacgatggagaaaatg

SEQ ID NO: 529 - RNA, 20 nt, synthetic construct
  source 1..20: mol_type = other RNA
aggcttacaacgatgtgggc

SEQ ID NO: 530 - RNA, 20 nt, synthetic construct
  source 1..20: mol_type = other RNA
aagtgaccaattattccctc

SEQ ID NO: 531 - RNA, 20 nt, synthetic construct
  source 1..20: mol_type = other RNA
tgtcacaacaaccttggaag

SEQ ID NO: 532 - RNA, 20 nt, synthetic construct
  source 1..20: mol_type = other RNA
aatagattggtatttttgtc

SEQ ID NO: 533 - RNA, 20 nt, synthetic construct
  source 1..20: mol_type = other RNA
acaatggcacggttgaatgt

SEQ ID NO: 534 - RNA, 20 nt, synthetic construct
  source 1..20: mol_type = other RNA
acacaacaggcacagctttg

SEQ ID NO: 535 - RNA, 20 nt, synthetic construct
  source 1..20: mol_type = other RNA
gttcagagttctatagattc

SEQ ID NO: 536 - RNA, 20 nt, synthetic construct
  source 1..20: mol_type = other RNA
agatttgattgttgaatatg

SEQ ID NO: 537 - RNA, 20 nt, synthetic construct
  source 1..20: mol_type = other RNA
ataaacattaaatgctatgg

SEQ ID NO: 538 - RNA, 20 nt, synthetic construct
  source 1..20: mol_type = other RNA
atccatccatccaggaaaat

SEQ ID NO: 539 - RNA, 20 nt, synthetic construct
  source 1..20: mol_type = other RNA
atggatcacggaaaaggcag

SEQ ID NO: 540 - RNA, 20 nt, synthetic construct
  source 1..20: mol_type = other RNA
gttgactatcagttcagcga

SEQ ID NO: 541 - RNA, 20 nt, synthetic construct
  source 1..20: mol_type = other RNA
cacaacaaccttggaagtag

SEQ ID NO: 542 - RNA, 20 nt, synthetic construct
  source 1..20: mol_type = other RNA
ctatagattctagtgcattc

SEQ ID NO: 543 - RNA, 20 nt, synthetic construct
  source 1..20: mol_type = other RNA
tgccaataatacttttggat

SEQ ID NO: 544 - RNA, 20 nt, synthetic construct
  source 1..20: mol_type = other RNA
gctttgtcaaatggactttt

SEQ ID NO: 545 - RNA, 20 nt, synthetic construct
  source 1..20: mol_type = other RNA
cttccccatgataaacacta

SEQ ID NO: 546 - RNA, 20 nt, synthetic construct
  source 1..20: mol_type = other RNA
cgtttggaaagctagtggtt

SEQ ID NO: 547 - RNA, 20 nt, synthetic construct
  source 1..20: mol_type = other RNA
aaactacaggagaaatataa

SEQ ID NO: 548 - RNA, 20 nt, synthetic construct
  source 1..20: mol_type = other RNA
aggaggcacttacacattcc

SEQ ID NO: 549 - RNA, 20 nt, synthetic construct
  source 1..20: mol_type = other RNA
cttgaatgcactagaatcta

SEQ ID NO: 550 - RNA, 20 nt, synthetic construct
  source 1..20: mol_type = other RNA
ttccaaacggtggcccagat

SEQ ID NO: 551 - RNA, 20 nt, synthetic construct
  source 1..20: mol_type = other RNA
tccaggaaaatcagacttaa

SEQ ID NO: 552 - RNA, 20 nt, synthetic construct
  source 1..20: mol_type = other RNA
ccctcaaggggtgccagggg

SEQ ID NO: 553 - RNA, 20 nt, synthetic construct
  source 1..20: mol_type = other RNA
tccaaagcaagctatcttct

SEQ ID NO: 554 - RNA, 20 nt, synthetic construct
  source 1..20: mol_type = other RNA
tagggaaggggaagaattca

SEQ ID NO: 555 - RNA, 20 nt, synthetic construct
  source 1..20: mol_type = other RNA
agcgagagttaatgattctg

SEQ ID NO: 556 - RNA, 20 nt, synthetic construct
  source 1..20: mol_type = other RNA
tttggaaagctagtggttca

SEQ ID NO: 557 - RNA, 20 nt, synthetic construct
  source 1..20: mol_type = other RNA
agacggttcccctggactca

SEQ ID NO: 558 - RNA, 20 nt, synthetic construct
  source 1..20: mol_type = other RNA
acgttgactatcagttcagc

SEQ ID NO: 559 - RNA, 20 nt, synthetic construct
  source 1..20: mol_type = other RNA
ctgcacatccactggcagta

SEQ ID NO: 560 - RNA, 20 nt, synthetic construct
  source 1..20: mol_type = other RNA
cacatccactggcagtacag

SEQ ID NO: 561 - RNA, 20 nt, synthetic construct
  source 1..20: mol_type = other RNA
atccactggcagtacagaag

SEQ ID NO: 562 - RNA, 20 nt, synthetic construct
  source 1..20: mol_type = other RNA
ttgacgtcagaattggacac

SEQ ID NO: 563 - RNA, 20 nt, synthetic construct
  source 1..20: mol_type = other RNA
attaactctcgctgaactga

SEQ ID NO: 564 - RNA, 20 nt, synthetic construct
  source 1..20: mol_type = other RNA
ccatacaaggagcggtcaac

SEQ ID NO: 565 - RNA, 20 nt, synthetic construct
  source 1..20: mol_type = other RNA
ttcaggatgaatttttccga

SEQ ID NO: 566 - RNA, 20 nt, synthetic construct
  source 1..20: mol_type = other RNA
gtgacttcaattatgaacgt

SEQ ID NO: 567 - RNA, 20 nt, synthetic construct
  source 1..20: mol_type = other RNA
gtcggaaaaattcatcctga

SEQ ID NO: 568 - RNA, 20 nt, synthetic construct
  source 1..20: mol_type = other RNA
attatatttctcctgtagtt

SEQ ID NO: 569 - RNA, 20 nt, synthetic construct
  source 1..20: mol_type = other RNA
aaggagcggtcaacaaggaa

SEQ ID NO: 570 - RNA, 20 nt, synthetic construct
  source 1..20: mol_type = other RNA
gagattaaaaggcaccgaag

SEQ ID NO: 571 - RNA, 20 nt, synthetic construct
  source 1..20: mol_type = other RNA
aacgagattaaaaggcaccg

SEQ ID NO: 572 - RNA, 20 nt, synthetic construct
  source 1..20: mol_type = other RNA
gaaaaattcatcctgaaagt

SEQ ID NO: 573 - RNA, 20 nt, synthetic construct
  source 1..20: mol_type = other RNA
attcatcctgaaagtgaggc

SEQ ID NO: 574 - RNA, 20 nt, synthetic construct
  source 1..20: mol_type = other RNA
gaaagaagacaacgacacgc

SEQ ID NO: 575 - RNA, 20 nt, synthetic construct
  source 1..20: mol_type = other RNA
tacaggagaaatataatagc

SEQ ID NO: 576 - RNA, 20 nt, synthetic construct
  source 1..20: mol_type = other RNA
atgagaataagcagaatgaa

SEQ ID NO: 577 - RNA, 20 nt, synthetic construct
  source 1..20: mol_type = other RNA
ccaggggaagcctcttccca

SEQ ID NO: 578 - RNA, 20 nt, synthetic construct
  source 1..20: mol_type = other RNA
cagaaatcctgacttacgac

SEQ ID NO: 579 - RNA, 20 nt, synthetic construct
  source 1..20: mol_type = other RNA
acagaaccttcactgataaa

SEQ ID NO: 580 - RNA, 20 nt, synthetic construct
  source 1..20: mol_type = other RNA
tcacgagcctgtcgtaagtc

SEQ ID NO: 581 - RNA, 20 nt, synthetic construct
  source 1..20: mol_type = other RNA
acttacgacaggctcgtgaa

SEQ ID NO: 582 - RNA, 20 nt, synthetic construct
  source 1..20: mol_type = other RNA
tgttcatatagatccactgc

SEQ ID NO: 583 - RNA, 20 nt, synthetic construct
  source 1..20: mol_type = other RNA
ccaaacctgaacaccagcag

SEQ ID NO: 584 - RNA, 20 nt, synthetic construct
  source 1..20: mol_type = other RNA
ctgtcgtaagtcaggatttc

SEQ ID NO: 585 - RNA, 20 nt, synthetic construct
  source 1..20: mol_type = other RNA
cagaaccttcactgataaat

SEQ ID NO: 586 - RNA, 20 nt, synthetic construct
  source 1..20: mol_type = other RNA
tattttaactttgcatttaa

SEQ ID NO: 587 - RNA, 20 nt, synthetic construct
  source 1..20: mol_type = other RNA
taagcagaatgaatggatca

SEQ ID NO: 588 - RNA, 20 nt, synthetic construct
  source 1..20: mol_type = other RNA
gaatggcatgctccaatgtg

SEQ ID NO: 589 - RNA, 20 nt, synthetic construct
  source 1..20: mol_type = other RNA
gtgcagacactaaactcatc

SEQ ID NO: 590 - RNA, 20 nt, synthetic construct
  source 1..20: mol_type = other RNA
tgaccaattattccctcaag

SEQ ID NO: 591 - RNA, 20 nt, synthetic construct
  source 1..20: mol_type = other RNA
gtgaccaattattccctcaa

SEQ ID NO: 592 - RNA, 20 nt, synthetic construct
  source 1..20: mol_type = other RNA
agtgaccaattattccctca

SEQ ID NO: 593 - RNA, 20 nt, synthetic construct
  source 1..20: mol_type = other RNA
gaatgaatggatcacggaaa

SEQ ID NO: 594 - RNA, 20 nt, synthetic construct
  source 1..20: mol_type = other RNA
tgcagacactaaactcatct

SEQ ID NO: 595 - RNA, 20 nt, synthetic construct
  source 1..20: mol_type = other RNA
ccaaagcaagctatcttctt

SEQ ID NO: 596 - RNA, 20 nt, synthetic construct
  source 1..20: mol_type = other RNA
acagcactgacttgccctcc

SEQ ID NO: 597 - RNA, 20 nt, synthetic construct
  source 1..20: mol_type = other RNA
ggagggcaagtcagtgctgt

SEQ ID NO: 598 - RNA, 20 nt, synthetic construct
  source 1..20: mol_type = other RNA
cacataaacattaaatgcta

SEQ ID NO: 599 - RNA, 20 nt, synthetic construct
  source 1..20: mol_type = other RNA
caaatggacttttgagatcc

SEQ ID NO: 600 - RNA, 20 nt, synthetic construct
  source 1..20: mol_type = other RNA
caatggcacggttgaatgta

SEQ ID NO: 601 - RNA, 20 nt, synthetic construct
  source 1..20: mol_type = other RNA
aaatactgtagtgtttatca

SEQ ID NO: 602 - RNA, 20 nt, synthetic construct
  source 1..20: mol_type = other RNA
caaagcaagctatcttctta

SEQ ID NO: 603 - RNA, 20 nt, synthetic construct
  source 1..20: mol_type = other RNA
ggaataaacctcaagtcctt

SEQ ID NO: 604 - RNA, 20 nt, synthetic construct
  source 1..20: mol_type = other RNA
accactagctttccaaacgg

SEQ ID NO: 605 - RNA, 20 nt, synthetic construct
  source 1..20: mol_type = other RNA
gcaagctatcttcttaggga

SEQ ID NO: 606 - RNA, 20 nt, synthetic construct
  source 1..20: mol_type = other RNA
caagctatcttcttagggaa

SEQ ID NO: 607 - RNA, 20 nt, synthetic construct
  source 1..20: mol_type = other RNA
tttgatcatgatgcccgcct

SEQ ID NO: 608 - RNA, 20 nt, synthetic construct
  source 1..20: mol_type = other RNA
ttgatcatgatgcccgcctt

SEQ ID NO: 609 - RNA, 20 nt, synthetic construct
  source 1..20: mol_type = other RNA
atagattggtatttttgtcc

SEQ ID NO: 610 - RNA, 20 nt, synthetic construct
  source 1..20: mol_type = other RNA
aggaataaacctcaagtcct

SEQ ID NO: 611 - RNA, 20 nt, synthetic construct
  source 1..20: mol_type = other RNA
cacaacaggcacagctttga

SEQ ID NO: 612 - RNA, 20 nt, synthetic construct
  source 1..20: mol_type = other RNA
tgacgtcagaattggacact

SEQ ID NO: 613 - RNA, 20 nt, synthetic construct
  source 1..20: mol_type = other RNA
actacagtatttgtaaacga

SEQ ID NO: 614 - RNA, 20 nt, synthetic construct
  source 1..20: mol_type = other RNA
agcaaatgtcacaacaacct

SEQ ID NO: 615 - RNA, 20 nt, synthetic construct
  source 1..20: mol_type = other RNA
gtctgattttcctggatgga

SEQ ID NO: 616 - RNA, 20 nt, synthetic construct
  source 1..20: mol_type = other RNA
tgctgatccaaaagtattat

SEQ ID NO: 617 - RNA, 20 nt, synthetic construct
  source 1..20: mol_type = other RNA
atcagacttaatagtccgcg

SEQ ID NO: 618 - RNA, 20 nt, synthetic construct
  source 1..20: mol_type = other RNA
tgcattcaagcacaatggca

SEQ ID NO: 619 - RNA, 20 nt, synthetic construct
  source 1..20: mol_type = other RNA
tcccagagcccacaatagat

SEQ ID NO: 620 - RNA, 20 nt, synthetic construct
  source 1..20: mol_type = other RNA
tcagcgagagttaatgattc

SEQ ID NO: 621 - RNA, 20 nt, synthetic construct
  source 1..20: mol_type = other RNA
gtgtgaaacgcgcctaccat

SEQ ID NO: 622 - RNA, 20 nt, synthetic construct
  source 1..20: mol_type = other RNA
tcagacttaatagtccgcgt

SEQ ID NO: 623 - RNA, 20 nt, synthetic construct
  source 1..20: mol_type = other RNA
tctagtgcattcaagcacaa

SEQ ID NO: 624 - RNA, 20 nt, synthetic construct
  source 1..20: mol_type = other RNA
attccctcaaggggtgccag

SEQ ID NO: 625 - RNA, 20 nt, synthetic construct
  source 1..20: mol_type = other RNA
aaggcagaagccaccaacac

SEQ ID NO: 626 - RNA, 20 nt, synthetic construct
  source 1..20: mol_type = other RNA
gaggtttattcctgacccca

SEQ ID NO: 627 - RNA, 20 nt, synthetic construct
  source 1..20: mol_type = other RNA
tttattcctgaccccaaggc

SEQ ID NO: 628 - RNA, 20 nt, synthetic construct
  source 1..20: mol_type = other RNA
gtttattcctgaccccaagg

SEQ ID NO: 629 - RNA, 20 nt, synthetic construct
  source 1..20: mol_type = other RNA
catacaaggagcggtcaaca

SEQ ID NO: 630 - RNA, 20 nt, synthetic construct
  source 1..20: mol_type = other RNA
aaaaattcatcctgaaagtg

SEQ ID NO: 631 - RNA, 20 nt, synthetic construct
  source 1..20: mol_type = other RNA
aaatataatagctggcatca

SEQ ID NO: 632 - RNA, 20 nt, synthetic construct
  source 1..20: mol_type = other RNA
tgacttcaattatgaacgtc

SEQ ID NO: 633 - RNA, 20 nt, synthetic construct
  source 1..20: mol_type = other RNA
ctagttctgtgtactcaacg

SEQ ID NO: 634 - RNA, 20 nt, synthetic construct
  source 1..20: mol_type = other RNA
agattaaaaggcaccgaagg

SEQ ID NO: 635 - RNA, 20 nt, synthetic construct
  source 1..20: mol_type = other RNA
acgagattaaaaggcaccga

SEQ ID NO: 636 - RNA, 20 nt, synthetic construct
  source 1..20: mol_type = other RNA
ggatgaaacgaatgagaata

SEQ ID NO: 637 - RNA, 20 nt, synthetic construct
  source 1..20: mol_type = other RNA
aactacaggagaaatataat

SEQ ID NO: 638 - RNA, 20 nt, synthetic construct
  source 1..20: mol_type = other RNA
tgggaaagaagacaacgaca

SEQ ID NO: 639 - RNA, 20 nt, synthetic construct
  source 1..20: mol_type = other RNA
gccaataatacttttggatc

SEQ ID NO: 640 - RNA, 20 nt, synthetic construct
  source 1..20: mol_type = other RNA
cttacgacaggctcgtgaat

SEQ ID NO: 641 - RNA, 20 nt, synthetic construct
  source 1..20: mol_type = other RNA
gttaaaataggcagaagtct

SEQ ID NO: 642 - RNA, 20 nt, synthetic construct
  source 1..20: mol_type = other RNA
ttctgttcatatagatccac

SEQ ID NO: 643 - RNA, 20 nt, synthetic construct
  source 1..20: mol_type = other RNA
agaaatcctgacttacgaca

SEQ ID NO: 644 - RNA, 20 nt, synthetic construct
  source 1..20: mol_type = other RNA
aacgatgtgggcaagacttc

SEQ ID NO: 645 - RNA, 20 nt, synthetic construct
  source 1..20: mol_type = other RNA
attccccaaacctgaacacc

SEQ ID NO: 646 - RNA, 20 nt, synthetic construct
  source 1..20: mol_type = other RNA
cgacaggctcgtgaatggca

SEQ ID NO: 647 - RNA, 20 nt, synthetic construct
  source 1..20: mol_type = other RNA
acttctgcctattttaactt

SEQ ID NO: 648 - RNA, 20 nt, synthetic construct
  source 1..20: mol_type = other RNA
gcgacgagattaggctgtta

SEQ ID NO: 649 - RNA, 20 nt, synthetic construct
  source 1..20: mol_type = other RNA
aagacaacgacacgctggtc

SEQ ID NO: 650 - RNA, 20 nt, synthetic construct
  source 1..20: mol_type = other RNA
tggatcacggaaaaggcaga

SEQ ID NO: 651 - RNA, 20 nt, synthetic construct
  source 1..20: mol_type = other RNA
gacacagacacaacaggcac

SEQ ID NO: 652 - RNA, 20 nt, synthetic construct
  source 1..20: mol_type = other RNA
gggaagaattcacagtgacg

SEQ ID NO: 653 - RNA, 20 nt, synthetic construct
  source 1..20: mol_type = other RNA
gcaccaacaaacacggctta

SEQ ID NO: 654 - RNA, 20 nt, synthetic construct
  source 1..20: mol_type = other RNA
tatagattctagtgcattca

SEQ ID NO: 655 - RNA, 20 nt, synthetic construct
  source 1..20: mol_type = other RNA
tcatgatcaaaagtgtgaaa

SEQ ID NO: 656 - RNA, 20 nt, synthetic construct
  source 1..20: mol_type = other RNA
atgatcaaaagtgtgaaacg

SEQ ID NO: 657 - RNA, 20 nt, synthetic construct
  source 1..20: mol_type = other RNA
aatgaatggatcacggaaaa

SEQ ID NO: 658 - RNA, 20 nt, synthetic construct
  source 1..20: mol_type = other RNA
ccaattattccctcaagggg

SEQ ID NO: 659 - RNA, 20 nt, synthetic construct
  source 1..20: mol_type = other RNA
cagacttaatagtccgcgtg

SEQ ID NO: 660 - RNA, 20 nt, synthetic construct
  source 1..20: mol_type = other RNA
tctgacgtcaatgctgccat

SEQ ID NO: 661 - RNA, 20 nt, synthetic construct
  source 1..20: mol_type = other RNA
gcataacagcctaatctcgt

SEQ ID NO: 662 - RNA, 20 nt, synthetic construct
  source 1..20: mol_type = other RNA
tttttccgacagcactgact

SEQ ID NO: 663 - RNA, 20 nt, synthetic construct
  source 1..20: mol_type = other RNA
tttccgtgatccattcattc

SEQ ID NO: 664 - RNA, 20 nt, synthetic construct
  source 1..20: mol_type = other RNA
tttgacaaagcccggatcag

SEQ ID NO: 665 - RNA, 20 nt, synthetic construct
  source 1..20: mol_type = other RNA
gcccagatgagtttagtgtc

SEQ ID NO: 666 - RNA, 20 nt, synthetic construct
  source 1..20: mol_type = other RNA
gctgaactgatagtcaacgt

SEQ ID NO: 667 - RNA, 20 nt, synthetic construct
  source 1..20: mol_type = other RNA
acacttttgatcatgatgcc

SEQ ID NO: 668 - RNA, 20 nt, synthetic construct
  source 1..20: mol_type = other RNA
gaaaatcagacttaatagtc

SEQ ID NO: 669 - RNA, 20 nt, synthetic construct
  source 1..20: mol_type = other RNA
gcagacactaaactcatctg

SEQ ID NO: 670 - RNA, 20 nt, synthetic construct
  source 1..20: mol_type = other RNA
ggaccaggagggcaagtcag

SEQ ID NO: 671 - RNA, 20 nt, synthetic construct
  source 1..20: mol_type = other RNA
gctgatccaaaagtattatt

SEQ ID NO: 672 - RNA, 20 nt, synthetic construct
  source 1..20: mol_type = other RNA
acatccactggcagtacaga

SEQ ID NO: 673 - RNA, 20 nt, synthetic construct
  source 1..20: mol_type = other RNA
cactggcagtacagaagcag

SEQ ID NO: 674 - RNA, 20 nt, synthetic construct
  source 1..20: mol_type = other RNA
aggcagaagccaccaacacc

SEQ ID NO: 675 - RNA, 20 nt, synthetic construct
  source 1..20: mol_type = other RNA
aggtttattcctgaccccaa

SEQ ID NO: 676 - RNA, 20 nt, synthetic construct
  source 1..20: mol_type = other RNA
ccaagcttttccttgttgac

SEQ ID NO: 677 - RNA, 20 nt, synthetic construct
  source 1..20: mol_type = other RNA
ttagtgtctgcacatccact

SEQ ID NO: 678 - RNA, 20 nt, synthetic construct
  source 1..20: mol_type = other RNA
ccactagctttccaaacggt

SEQ ID NO: 679 - RNA, 20 nt, synthetic construct
  source 1..20: mol_type = other RNA
cctcaaggggtgccagggga

SEQ ID NO: 680 - RNA, 20 nt, synthetic construct
  source 1..20: mol_type = other RNA
tgtgaaacgcgcctaccatc

SEQ ID NO: 681 - RNA, 20 nt, synthetic construct
  source 1..20: mol_type = other RNA
ctagtgcattcaagcacaat

SEQ ID NO: 682 - RNA, 20 nt, synthetic construct
  source 1..20: mol_type = other RNA
ccgcgtgggcgacgagatta

SEQ ID NO: 683 - RNA, 20 nt, synthetic construct
  source 1..20: mol_type = other RNA
ttattcctgaccccaaggcg

SEQ ID NO: 684 - RNA, 20 nt, synthetic construct
  source 1..20: mol_type = other RNA
actccagaatcattaactct

SEQ ID NO: 685 - RNA, 20 nt, synthetic construct
  source 1..20: mol_type = other RNA
ggctgttatgcactgatccg

SEQ ID NO: 686 - RNA, 20 nt, synthetic construct
  source 1..20: mol_type = other RNA
ttcatctaacgagattaaaa

SEQ ID NO: 687 - RNA, 20 nt, synthetic construct
  source 1..20: mol_type = other RNA
acaggagaaatataatagct

SEQ ID NO: 688 - RNA, 20 nt, synthetic construct
  source 1..20: mol_type = other RNA
tcaggatgaatttttccgac

SEQ ID NO: 689 - RNA, 20 nt, synthetic construct
  source 1..20: mol_type = other RNA
gacttcaattatgaacgtca

SEQ ID NO: 690 - RNA, 20 nt, synthetic construct
  source 1..20: mol_type = other RNA
aggagcggtcaacaaggaaa

SEQ ID NO: 691 - RNA, 20 nt, synthetic construct
  source 1..20: mol_type = other RNA
gattaaaaggcaccgaagga

SEQ ID NO: 692 - RNA, 20 nt, synthetic construct
  source 1..20: mol_type = other RNA
aaaattcatcctgaaagtga

SEQ ID NO: 693 - RNA, 20 nt, synthetic construct
  source 1..20: mol_type = other RNA
ataatagctggcatcacggt

SEQ ID NO: 694 - RNA, 20 nt, synthetic construct
  source 1..20: mol_type = other RNA
ccactagctttccaaacggt

SEQ ID NO: 695 - RNA, 20 nt, synthetic construct
  source 1..20: mol_type = other RNA
gctgaactgatagtcaacgt

SEQ ID NO: 696 - RNA, 20 nt, synthetic construct
  source 1..20: mol_type = other RNA
tttgacaaagcccggatcag

SEQ ID NO: 697 - RNA, 20 nt, synthetic construct
  source 1..20: mol_type = other RNA
tgaaagtgaggccaggtact

SEQ ID NO: 698 - RNA, 20 nt, synthetic construct
  source 1..20: mol_type = other RNA
aaacagtcaggtgagtgaat

SEQ ID NO: 699 - RNA, 20 nt, synthetic construct
  source 1..20: mol_type = other RNA
aactacaggagaaatataat

SEQ ID NO: 700 - RNA, 20 nt, synthetic construct
  source 1..20: mol_type = other RNA
gattaaaaggcaccgaagga

SEQ ID NO: 701 - RNA, 20 nt, synthetic construct
  source 1..20: mol_type = other RNA
ggctttacctccaatggtgc

SEQ ID NO: 702 - RNA, 20 nt, synthetic construct
  source 1..20: mol_type = other RNA
cagtacctggcctcactttc

SEQ ID NO: 703 - DNA, 20 bp, Homo sapiens
  source 1..20: mol_type = genomic DNA
atgaaacgaatgagaataag

SEQ ID NO: 704 - DNA, 20 bp, Homo sapiens
  source 1..20: mol_type = genomic DNA
tggatgaaacgaatgagaat

SEQ ID NO: 705 - DNA, 20 bp, Homo sapiens
  source 1..20: mol_type = genomic DNA
gccaggggaagcctcttccc

SEQ ID NO: 706 - DNA, 20 bp, Homo sapiens
  source 1..20: mol_type = genomic DNA
tctgtgtactcaacgtggaa

SEQ ID NO: 707 - DNA, 20 bp, Homo sapiens
  source 1..20: mol_type = genomic DNA
tgtgtactcaacgtggaaaa

SEQ ID NO: 708 - DNA, 20 bp, Homo sapiens
  source 1..20: mol_type = genomic DNA
gggaagattatcccaagtct

SEQ ID NO: 709 - DNA, 20 bp, Homo sapiens
  source 1..20: mol_type = genomic DNA
ccagaaatcctgacttacga

SEQ ID NO: 710 - DNA, 20 bp, Homo sapiens
  source 1..20: mol_type = genomic DNA
tctgagaatgaaagtaatat

SEQ ID NO: 711 - DNA, 20 bp, Homo sapiens
  source 1..20: mol_type = genomic DNA
ctattttaactttgcattta

SEQ ID NO: 712 - DNA, 20 bp, Homo sapiens
  source 1..20: mol_type = genomic DNA
ttcacgagcctgtcgtaagt

SEQ ID NO: 713 - DNA, 20 bp, Homo sapiens
  source 1..20: mol_type = genomic DNA
cagcagtggatctatatgaa

SEQ ID NO: 714 - DNA, 20 bp, Homo sapiens
  source 1..20: mol_type = genomic DNA
cattccccaaacctgaacac

SEQ ID NO: 715 - DNA, 20 bp, Homo sapiens
  source 1..20: mol_type = genomic DNA
tatcccaagtctgagaatga

SEQ ID NO: 716 - DNA, 20 bp, Homo sapiens
  source 1..20: mol_type = genomic DNA
ataaatgggaagattatccc

SEQ ID NO: 717 - DNA, 20 bp, Homo sapiens
  source 1..20: mol_type = genomic DNA
tccccaaacctgaacaccag

SEQ ID NO: 718 - DNA, 20 bp, Homo sapiens
  source 1..20: mol_type = genomic DNA
gccattcacgagcctgtcgt

SEQ ID NO: 719 - DNA, 20 bp, Homo sapiens
  source 1..20: mol_type = genomic DNA
aaatgtcacaacaaccttgg

SEQ ID NO: 720 - DNA, 20 bp, Homo sapiens
  source 1..20: mol_type = genomic DNA
cgtggaaaagagaaaacagt

SEQ ID NO: 721 - DNA, 20 bp, Homo sapiens
  source 1..20: mol_type = genomic DNA
ccatttgacaaagcccggat

SEQ ID NO: 722 - DNA, 20 bp, Homo sapiens
  source 1..20: mol_type = genomic DNA
agcaagctatcttcttaggg

SEQ ID NO: 723 - DNA, 20 bp, Homo sapiens
  source 1..20: mol_type = genomic DNA
tgaggtttattcctgacccc

SEQ ID NO: 724 - DNA, 20 bp, Homo sapiens
  source 1..20: mol_type = genomic DNA
tgaatggatcacggaaaagg

SEQ ID NO: 725 - DNA, 20 bp, Homo sapiens
  source 1..20: mol_type = genomic DNA
ccactggcagtacagaagca

SEQ ID NO: 726 - DNA, 20 bp, Homo sapiens
  source 1..20: mol_type = genomic DNA
agaatgaatggatcacggaa

SEQ ID NO: 727 - DNA, 20 bp, Homo sapiens
  source 1..20: mol_type = genomic DNA
tgtaaacgatggagaaaatg

SEQ ID NO: 728 - DNA, 20 bp, Homo sapiens
  source 1..20: mol_type = genomic DNA
aggcttacaacgatgtgggc

SEQ ID NO: 729 - DNA, 20 bp, Homo sapiens
  source 1..20: mol_type = genomic DNA
aagtgaccaattattccctc

SEQ ID NO: 730 - DNA, 20 bp, Homo sapiens
  source 1..20: mol_type = genomic DNA
tgtcacaacaaccttggaag

SEQ ID NO: 731 - DNA, 20 bp, Homo sapiens
  source 1..20: mol_type = genomic DNA
aatagattggtatttttgtc

SEQ ID NO: 732 - DNA, 20 bp, Homo sapiens
  source 1..20: mol_type = genomic DNA
acaatggcacggttgaatgt

SEQ ID NO: 733 - DNA, 20 bp, Homo sapiens
  source 1..20: mol_type = genomic DNA
acacaacaggcacagctttg

SEQ ID NO: 734 - DNA, 20 bp, Homo sapiens
  source 1..20: mol_type = genomic DNA
gttcagagttctatagattc

SEQ ID NO: 735 - DNA, 20 bp, Homo sapiens
  source 1..20: mol_type = genomic DNA
agatttgattgttgaatatg

SEQ ID NO: 736 - DNA, 20 bp, Homo sapiens
  source 1..20: mol_type = genomic DNA
ataaacattaaatgctatgg

SEQ ID NO: 737 - DNA, 20 bp, Homo sapiens
  source 1..20: mol_type = genomic DNA
atccatccatccaggaaaat

SEQ ID NO: 738 - DNA, 20 bp, Homo sapiens
  source 1..20: mol_type = genomic DNA
atggatcacggaaaaggcag

SEQ ID NO: 739 - DNA, 20 bp, Homo sapiens
  source 1..20: mol_type = genomic DNA
gttgactatcagttcagcga

SEQ ID NO: 740 - DNA, 20 bp, Homo sapiens
  source 1..20: mol_type = genomic DNA
cacaacaaccttggaagtag

SEQ ID NO: 741 - DNA, 20 bp, Homo sapiens
  source 1..20: mol_type = genomic DNA
ctatagattctagtgcattc

SEQ ID NO: 742 - DNA, 20 bp, Homo sapiens
  source 1..20: mol_type = genomic DNA
tgccaataatacttttggat

SEQ ID NO: 743 - DNA, 20 bp, Homo sapiens
  source 1..20: mol_type = genomic DNA
gctttgtcaaatggactttt

SEQ ID NO: 744 - DNA, 20 bp, Homo sapiens
  source 1..20: mol_type = genomic DNA
cttccccatgataaacacta

SEQ ID NO: 745 - DNA, 20 bp, Homo sapiens
  source 1..20: mol_type = genomic DNA
cgtttggaaagctagtggtt

SEQ ID NO: 746 - DNA, 20 bp, Homo sapiens
  source 1..20: mol_type = genomic DNA
aaactacaggagaaatataa

SEQ ID NO: 747 - DNA, 20 bp, Homo sapiens
  source 1..20: mol_type = genomic DNA
aggaggcacttacacattcc

SEQ ID NO: 748 - DNA, 20 bp, Homo sapiens
  source 1..20: mol_type = genomic DNA
cttgaatgcactagaatcta

SEQ ID NO: 749 - DNA, 20 bp, Homo sapiens
  source 1..20: mol_type = genomic DNA
ttccaaacggtggcccagat

SEQ ID NO: 750 - DNA, 20 bp, Homo sapiens
  source 1..20: mol_type = genomic DNA
tccaggaaaatcagacttaa

SEQ ID NO: 751 - DNA, 20 bp, Homo sapiens
  source 1..20: mol_type = genomic DNA
ccctcaaggggtgccagggg

SEQ ID NO: 752 - DNA, 20 bp, Homo sapiens
  source 1..20: mol_type = genomic DNA
tccaaagcaagctatcttct

SEQ ID NO: 753 - DNA, 20 bp, Homo sapiens
  source 1..20: mol_type = genomic DNA
tagggaaggggaagaattca

SEQ ID NO: 754 - DNA, 20 bp, Homo sapiens
  source 1..20: mol_type = genomic DNA
agcgagagttaatgattctg

SEQ ID NO: 755 - DNA, 20 bp, Homo sapiens
  source 1..20: mol_type = genomic DNA
tttggaaagctagtggttca

SEQ ID NO: 756 - DNA, 20 bp, Homo sapiens
  source 1..20: mol_type = genomic DNA
agacggttcccctggactca

SEQ ID NO: 757 - DNA, 20 bp, Homo sapiens
  source 1..20: mol_type = genomic DNA
acgttgactatcagttcagc

SEQ ID NO: 758 - DNA, 20 bp, Homo sapiens
  source 1..20: mol_type = genomic DNA
ctgcacatccactggcagta

SEQ ID NO: 759 - DNA, 20 bp, Homo sapiens
  source 1..20: mol_type = genomic DNA
cacatccactggcagtacag

SEQ ID NO: 760 - DNA, 20 bp, Homo sapiens
  source 1..20: mol_type = genomic DNA
atccactggcagtacagaag

SEQ ID NO: 761 - DNA, 20 bp, Homo sapiens
  source 1..20: mol_type = genomic DNA
ttgacgtcagaattggacac

SEQ ID NO: 762 - DNA, 20 bp, Homo sapiens
  source 1..20: mol_type = genomic DNA
attaactctcgctgaactga

SEQ ID NO: 763 - DNA, 20 bp, Homo sapiens
  source 1..20: mol_type = genomic DNA
ccatacaaggagcggtcaac

SEQ ID NO: 764 - DNA, 20 bp, Homo sapiens
  source 1..20: mol_type = genomic DNA
ttcaggatgaatttttccga

SEQ ID NO: 765 - DNA, 20 bp, Homo sapiens
  source 1..20: mol_type = genomic DNA
gtgacttcaattatgaacgt

SEQ ID NO: 766 - DNA, 20 bp, Homo sapiens
  source 1..20: mol_type = genomic DNA
gtcggaaaaattcatcctga

SEQ ID NO: 767 - DNA, 20 bp, Homo sapiens
  source 1..20: mol_type = genomic DNA
attatatttctcctgtagtt

SEQ ID NO: 768 - DNA, 20 bp, Homo sapiens
  source 1..20: mol_type = genomic DNA
aaggagcggtcaacaaggaa

SEQ ID NO: 769 - DNA, 20 bp, Homo sapiens
  source 1..20: mol_type = genomic DNA
gagattaaaaggcaccgaag

SEQ ID NO: 770 - DNA, 20 bp, Homo sapiens
  source 1..20: mol_type = genomic DNA
aacgagattaaaaggcaccg

SEQ ID NO: 771 - DNA, 20 bp, Homo sapiens
  source 1..20: mol_type = genomic DNA
gaaaaattcatcctgaaagt

SEQ ID NO: 772 - DNA, 20 bp, Homo sapiens
  source 1..20: mol_type = genomic DNA
attcatcctgaaagtgaggc

SEQ ID NO: 773 - DNA, 20 bp, Homo sapiens
  source 1..20: mol_type = genomic DNA
gaaagaagacaacgacacgc

SEQ ID NO: 774 - DNA, 20 bp, Homo sapiens
  source 1..20: mol_type = genomic DNA
tacaggagaaatataatagc

SEQ ID NO: 775 - DNA, 20 bp, Homo sapiens
  source 1..20: mol_type = genomic DNA
atgagaataagcagaatgaa

SEQ ID NO: 776 - DNA, 20 bp, Homo sapiens
  source 1..20: mol_type = genomic DNA
ccaggggaagcctcttccca

SEQ ID NO: 777 - DNA, 20 bp, Homo sapiens
  source 1..20: mol_type = genomic DNA
cagaaatcctgacttacgac

SEQ ID NO: 778 - DNA, 20 bp, Homo sapiens
  source 1..20: mol_type = genomic DNA
acagaaccttcactgataaa

SEQ ID NO: 779 - DNA, 20 bp, Homo sapiens
  source 1..20: mol_type = genomic DNA
tcacgagcctgtcgtaagtc

SEQ ID NO: 780 - DNA, 20 bp, Homo sapiens
  source 1..20: mol_type = genomic DNA
acttacgacaggctcgtgaa

SEQ ID NO: 781 - DNA, 20 bp, Homo sapiens
  source 1..20: mol_type = genomic DNA
tgttcatatagatccactgc

SEQ ID NO: 782 - DNA, 20 bp, Homo sapiens
  source 1..20: mol_type = genomic DNA
ccaaacctgaacaccagcag

SEQ ID NO: 783 - DNA, 20 bp, Homo sapiens
  source 1..20: mol_type = genomic DNA
ctgtcgtaagtcaggatttc

SEQ ID NO: 784 - DNA, 20 bp, Homo sapiens
  source 1..20: mol_type = genomic DNA
cagaaccttcactgataaat

SEQ ID NO: 785 - DNA, 20 bp, Homo sapiens
  source 1..20: mol_type = genomic DNA
tattttaactttgcatttaa

SEQ ID NO: 786 - DNA, 20 bp, Homo sapiens
  source 1..20: mol_type = genomic DNA
taagcagaatgaatggatca

SEQ ID NO: 787 - DNA, 20 bp, Homo sapiens
  source 1..20: mol_type = genomic DNA
gaatggcatgctccaatgtg

SEQ ID NO: 788 - DNA, 20 bp, Homo sapiens
  source 1..20: mol_type = genomic DNA
gtgcagacactaaactcatc

SEQ ID NO: 789 - DNA, 20 bp, Homo sapiens
  source 1..20: mol_type = genomic DNA
tgaccaattattccctcaag

SEQ ID NO: 790 - DNA, 20 bp, Homo sapiens
  source 1..20: mol_type = genomic DNA
gtgaccaattattccctcaa

SEQ ID NO: 791 - DNA, 20 bp, Homo sapiens
  source 1..20: mol_type = genomic DNA
agtgaccaattattccctca

SEQ ID NO: 792 - DNA, 20 bp, Homo sapiens
  source 1..20: mol_type = genomic DNA
gaatgaatggatcacggaaa

SEQ ID NO: 793 - DNA, 20 bp, Homo sapiens
  source 1..20: mol_type = genomic DNA
tgcagacactaaactcatct

SEQ ID NO: 794 - DNA, 20 bp, Homo sapiens
  source 1..20: mol_type = genomic DNA
ccaaagcaagctatcttctt

SEQ ID NO: 795 - DNA, 20 bp, Homo sapiens
  source 1..20: mol_type = genomic DNA
acagcactgacttgccctcc

SEQ ID NO: 796 - DNA, 20 bp, Homo sapiens
  source 1..20: mol_type = genomic DNA
ggagggcaagtcagtgctgt

SEQ ID NO: 797 - DNA, 20 bp, Homo sapiens
  source 1..20: mol_type = genomic DNA
cacataaacattaaatgcta

SEQ ID NO: 798 - DNA, 20 bp, Homo sapiens
  source 1..20: mol_type = genomic DNA
caaatggacttttgagatcc

SEQ ID NO: 799 - DNA, 20 bp, Homo sapiens
  source 1..20: mol_type = genomic DNA
caatggcacggttgaatgta

SEQ ID NO: 800 - DNA, 20 bp, Homo sapiens
  source 1..20: mol_type = genomic DNA
aaatactgtagtgtttatca

SEQ ID NO: 801 - DNA, 20 bp, Homo sapiens
  source 1..20: mol_type = genomic DNA
caaagcaagctatcttctta

SEQ ID NO: 802 - DNA, 20 bp, Homo sapiens
  source 1..20: mol_type = genomic DNA
ggaataaacctcaagtcctt

SEQ ID NO: 803 - DNA, 20 bp, Homo sapiens
  source 1..20: mol_type = genomic DNA
accactagctttccaaacgg

SEQ ID NO: 804 - DNA, 20 bp, Homo sapiens
  source 1..20: mol_type = genomic DNA
gcaagctatcttcttaggga

SEQ ID NO: 805 - DNA, 20 bp, Homo sapiens
  source 1..20: mol_type = genomic DNA
caagctatcttcttagggaa

SEQ ID NO: 806 - DNA, 20 bp, Homo sapiens
  source 1..20: mol_type = genomic DNA
tttgatcatgatgcccgcct

SEQ ID NO: 807 - DNA, 20 bp, Homo sapiens
  source 1..20: mol_type = genomic DNA
ttgatcatgatgcccgcctt

SEQ ID NO: 808 - DNA, 20 bp, Homo sapiens
  source 1..20: mol_type = genomic DNA
atagattggtatttttgtcc

SEQ ID NO: 809 - DNA, 20 bp, Homo sapiens
  source 1..20: mol_type = genomic DNA
aggaataaacctcaagtcct

SEQ ID NO: 810 - DNA, 20 bp, Homo sapiens
  source 1..20: mol_type = genomic DNA
cacaacaggcacagctttga

SEQ ID NO: 811 - DNA, 20 bp, Homo sapiens
  source 1..20: mol_type = genomic DNA
tgacgtcagaattggacact

SEQ ID NO: 812 - DNA, 20 bp, Homo sapiens
  source 1..20: mol_type = genomic DNA
actacagtatttgtaaacga

SEQ ID NO: 813 - DNA, 20 bp, Homo sapiens
  source 1..20: mol_type = genomic DNA
agcaaatgtcacaacaacct

SEQ ID NO: 814 - DNA, 20 bp, Homo sapiens
  source 1..20: mol_type = genomic DNA
gtctgattttcctggatgga

SEQ ID NO: 815 - DNA, 20 bp, Homo sapiens
  source 1..20: mol_type = genomic DNA
tgctgatccaaaagtattat

SEQ ID NO: 816 - DNA, 20 bp, Homo sapiens
  source 1..20: mol_type = genomic DNA
atcagacttaatagtccgcg

SEQ ID NO: 817 - DNA, 20 bp, Homo sapiens
  source 1..20: mol_type = genomic DNA
tgcattcaagcacaatggca

SEQ ID NO: 818 - DNA, 20 bp, Homo sapiens
  source 1..20: mol_type = genomic DNA
tcccagagcccacaatagat

SEQ ID NO: 819 - DNA, 20 bp, Homo sapiens
  source 1..20: mol_type = genomic DNA
tcagcgagagttaatgattc

SEQ ID NO: 820 - DNA, 20 bp, Homo sapiens
  source 1..20: mol_type = genomic DNA
gtgtgaaacgcgcctaccat

SEQ ID NO: 821 - DNA, 20 bp, Homo sapiens
  source 1..20: mol_type = genomic DNA
tcagacttaatagtccgcgt

SEQ ID NO: 822 - DNA, 20 bp, Homo sapiens
  source 1..20: mol_type = genomic DNA
tctagtgcattcaagcacaa

SEQ ID NO: 823 - DNA, 20 bp, Homo sapiens
  source 1..20: mol_type = genomic DNA
attccctcaaggggtgccag

SEQ ID NO: 824 - DNA, 20 bp, Homo sapiens
  source 1..20: mol_type = genomic DNA
aaggcagaagccaccaacac

SEQ ID NO: 825 - DNA, 20 bp, Homo sapiens
  source 1..20: mol_type = genomic DNA
gaggtttattcctgacccca

SEQ ID NO: 826 - DNA, 20 bp, Homo sapiens
  source 1..20: mol_type = genomic DNA
tttattcctgaccccaaggc

SEQ ID NO: 827 - DNA, 20 bp, Homo sapiens
  source 1..20: mol_type = genomic DNA
gtttattcctgaccccaagg

SEQ ID NO: 828 - DNA, 20 bp, Homo sapiens
  source 1..20: mol_type = genomic DNA
catacaaggagcggtcaaca

SEQ ID NO: 829 - DNA, 20 bp, Homo sapiens
  source 1..20: mol_type = genomic DNA
aaaaattcatcctgaaagtg

SEQ ID NO: 830 - DNA, 20 bp, Homo sapiens
  source 1..20: mol_type = genomic DNA
aaatataatagctggcatca

SEQ ID NO: 831 - DNA, 20 bp, Homo sapiens
  source 1..20: mol_type = genomic DNA
tgacttcaattatgaacgtc

SEQ ID NO: 832 - DNA, 20 bp, Homo sapiens
  source 1..20: mol_type = genomic DNA
ctagttctgtgtactcaacg

SEQ ID NO: 833 - DNA, 20 bp, Homo sapiens
  source 1..20: mol_type = genomic DNA
agattaaaaggcaccgaagg

SEQ ID NO: 834 - DNA, 20 bp, Homo sapiens
  source 1..20: mol_type = genomic DNA
acgagattaaaaggcaccga

SEQ ID NO: 835 - DNA, 20 bp, Homo sapiens
  source 1..20: mol_type = genomic DNA
ggatgaaacgaatgagaata

SEQ ID NO: 836 - DNA, 20 bp, Homo sapiens
  source 1..20: mol_type = genomic DNA
aactacaggagaaatataat

SEQ ID NO: 837 - DNA, 20 bp, Homo sapiens
  source 1..20: mol_type = genomic DNA
tgggaaagaagacaacgaca

SEQ ID NO: 838 - DNA, 20 bp, Homo sapiens
  source 1..20: mol_type = genomic DNA
gccaataatacttttggatc

SEQ ID NO: 839 - DNA, 20 bp, Homo sapiens
  source 1..20: mol_type = genomic DNA
cttacgacaggctcgtgaat

SEQ ID NO: 840 - DNA, 20 bp, Homo sapiens
  source 1..20: mol_type = genomic DNA
gttaaaataggcagaagtct

SEQ ID NO: 841 - DNA, 20 bp, Homo sapiens
  source 1..20: mol_type = genomic DNA
ttctgttcatatagatccac

SEQ ID NO: 842 - DNA, 20 bp, Homo sapiens
  source 1..20: mol_type = genomic DNA
agaaatcctgacttacgaca

SEQ ID NO: 843 - DNA, 20 bp, Homo sapiens
  source 1..20: mol_type = genomic DNA
aacgatgtgggcaagacttc

SEQ ID NO: 844 - DNA, 20 bp, Homo sapiens
  source 1..20: mol_type = genomic DNA
attccccaaacctgaacacc

SEQ ID NO: 845 - DNA, 20 bp, Homo sapiens
  source 1..20: mol_type = genomic DNA
cgacaggctcgtgaatggca

SEQ ID NO: 846 - DNA, 20 bp, Homo sapiens
  source 1..20: mol_type = genomic DNA
acttctgcctattttaactt

SEQ ID NO: 847 - DNA, 20 bp, Homo sapiens
  source 1..20: mol_type = genomic DNA
gcgacgagattaggctgtta

SEQ ID NO: 848 - DNA, 20 bp, Homo sapiens
  source 1..20: mol_type = genomic DNA
aagacaacgacacgctggtc

SEQ ID NO: 849 - DNA, 20 bp, Homo sapiens
  source 1..20: mol_type = genomic DNA
tggatcacggaaaaggcaga

SEQ ID NO: 850 - DNA, 20 bp, Homo sapiens
  source 1..20: mol_type = genomic DNA
gacacagacacaacaggcac

SEQ ID NO: 851 - DNA, 20 bp, Homo sapiens
  source 1..20: mol_type = genomic DNA
gggaagaattcacagtgacg

SEQ ID NO: 852 - DNA, 20 bp, Homo sapiens
  source 1..20: mol_type = genomic DNA
gcaccaacaaacacggctta

SEQ ID NO: 853 - DNA, 20 bp, Homo sapiens
  source 1..20: mol_type = genomic DNA
tatagattctagtgcattca

SEQ ID NO: 854 - DNA, 20 bp, Homo sapiens
  source 1..20: mol_type = genomic DNA
tcatgatcaaaagtgtgaaa

SEQ ID NO: 855 - DNA, 20 bp, Homo sapiens
  source 1..20: mol_type = genomic DNA
atgatcaaaagtgtgaaacg

SEQ ID NO: 856 - DNA, 20 bp, Homo sapiens
  source 1..20: mol_type = genomic DNA
aatgaatggatcacggaaaa

SEQ ID NO: 857 - DNA, 20 bp, Homo sapiens
  source 1..20: mol_type = genomic DNA
ccaattattccctcaagggg

SEQ ID NO: 858 - DNA, 20 bp, Homo sapiens
  source 1..20: mol_type = genomic DNA
cagacttaatagtccgcgtg

SEQ ID NO: 859 - DNA, 20 bp, Homo sapiens
  source 1..20: mol_type = genomic DNA
tctgacgtcaatgctgccat

SEQ ID NO: 860 - DNA, 20 bp, Homo sapiens
  source 1..20: mol_type = genomic DNA
gcataacagcctaatctcgt

SEQ ID NO: 861 - DNA, 20 bp, Homo sapiens
  source 1..20: mol_type = genomic DNA
tttttccgacagcactgact

SEQ ID NO: 862 - DNA, 20 bp, Homo sapiens
  source 1..20: mol_type = genomic DNA
tttccgtgatccattcattc

SEQ ID NO: 863 - DNA, 20 bp, Homo sapiens
  source 1..20: mol_type = genomic DNA
tttgacaaagcccggatcag

SEQ ID NO: 864 - DNA, 20 bp, Homo sapiens
  source 1..20: mol_type = genomic DNA
gcccagatgagtttagtgtc

SEQ ID NO: 865 - DNA, 20 bp, Homo sapiens
  source 1..20: mol_type = genomic DNA
gctgaactgatagtcaacgt

SEQ ID NO: 866 - DNA, 20 bp, Homo sapiens
  source 1..20: mol_type = genomic DNA
acacttttgatcatgatgcc

SEQ ID NO: 867 - DNA, 20 bp, Homo sapiens
  source 1..20: mol_type = genomic DNA
gaaaatcagacttaatagtc

SEQ ID NO: 868 - DNA, 20 bp, Homo sapiens
  source 1..20: mol_type = genomic DNA
gcagacactaaactcatctg

SEQ ID NO: 869 - DNA, 20 bp, Homo sapiens
  source 1..20: mol_type = genomic DNA
ggaccaggagggcaagtcag

SEQ ID NO: 870 - DNA, 20 bp, Homo sapiens
  source 1..20: mol_type = genomic DNA
gctgatccaaaagtattatt

SEQ ID NO: 871 - DNA, 20 bp, Homo sapiens
  source 1..20: mol_type = genomic DNA
acatccactggcagtacaga

SEQ ID NO: 872 - DNA, 20 bp, Homo sapiens
  source 1..20: mol_type = genomic DNA
cactggcagtacagaagcag

SEQ ID NO: 873 - DNA, 20 bp, Homo sapiens
  source 1..20: mol_type = genomic DNA
aggcagaagccaccaacacc

SEQ ID NO: 874 - DNA, 20 bp, Homo sapiens
  source 1..20: mol_type = genomic DNA
aggtttattcctgaccccaa

SEQ ID NO: 875 - DNA, 20 bp, Homo sapiens
  source 1..20: mol_type = genomic DNA
ccaagcttttccttgttgac

SEQ ID NO: 876 - DNA, 20 bp, Homo sapiens
  source 1..20: mol_type = genomic DNA
ttagtgtctgcacatccact

SEQ ID NO: 877 - DNA, 20 bp, Homo sapiens
  source 1..20: mol_type = genomic DNA
ccactagctttccaaacggt

SEQ ID NO: 878 - DNA, 20 bp, Homo sapiens
  source 1..20: mol_type = genomic DNA
cctcaaggggtgccagggga

SEQ ID NO: 879 - DNA, 20 bp, Homo sapiens
  source 1..20: mol_type = genomic DNA
tgtgaaacgcgcctaccatc

SEQ ID NO: 880 - DNA, 20 bp, Homo sapiens
  source 1..20: mol_type = genomic DNA
ctagtgcattcaagcacaat

SEQ ID NO: 881 - DNA, 20 bp, Homo sapiens
  source 1..20: mol_type = genomic DNA
ccgcgtgggcgacgagatta

SEQ ID NO: 882 - DNA, 20 bp, Homo sapiens
  source 1..20: mol_type = genomic DNA
ttattcctgaccccaaggcg

SEQ ID NO: 883 - DNA, 20 bp, Homo sapiens
  source 1..20: mol_type = genomic DNA
actccagaatcattaactct

SEQ ID NO: 884 - DNA, 20 bp, Homo sapiens
  source 1..20: mol_type = genomic DNA
ggctgttatgcactgatccg

SEQ ID NO: 885 - DNA, 20 bp, Homo sapiens
  source 1..20: mol_type = genomic DNA
ttcatctaacgagattaaaa

SEQ ID NO: 886 - DNA, 20 bp, Homo sapiens
  source 1..20: mol_type = genomic DNA
acaggagaaatataatagct

SEQ ID NO: 887 - DNA, 20 bp, Homo sapiens
  source 1..20: mol_type = genomic DNA
tcaggatgaatttttccgac

SEQ ID NO: 888 - DNA, 20 bp, Homo sapiens
  source 1..20: mol_type = genomic DNA
gacttcaattatgaacgtca

SEQ ID NO: 889 - DNA, 20 bp, Homo sapiens
  source 1..20: mol_type = genomic DNA
aggagcggtcaacaaggaaa

SEQ ID NO: 890 - DNA, 20 bp, Homo sapiens
  source 1..20: mol_type = genomic DNA
gattaaaaggcaccgaagga

SEQ ID NO: 891 - DNA, 20 bp, Homo sapiens
  source 1..20: mol_type = genomic DNA
aaaattcatcctgaaagtga

SEQ ID NO: 892 - DNA, 20 bp, Homo sapiens
  source 1..20: mol_type = genomic DNA
ataatagctggcatcacggt

SEQ ID NO: 893 - DNA, 20 bp, Homo sapiens
  source 1..20: mol_type = genomic DNA
ccactagctttccaaacggt

SEQ ID NO: 894 - DNA, 20 bp, Homo sapiens
  source 1..20: mol_type = genomic DNA
gctgaactgatagtcaacgt

SEQ ID NO: 895 - DNA, 20 bp, Homo sapiens
  source 1..20: mol_type = genomic DNA
tttgacaaagcccggatcag

SEQ ID NO: 896 - DNA, 20 bp, Homo sapiens
  source 1..20: mol_type = genomic DNA
tgaaagtgaggccaggtact

SEQ ID NO: 897 - DNA, 20 bp, Homo sapiens
  source 1..20: mol_type = genomic DNA
aaacagtcaggtgagtgaat

SEQ ID NO: 898 - DNA, 20 bp, Homo sapiens
  source 1..20: mol_type = genomic DNA
aactacaggagaaatataat

SEQ ID NO: 899 - DNA, 20 bp, Homo sapiens
  source 1..20: mol_type = genomic DNA
gattaaaaggcaccgaagga

SEQ ID NO: 900 - DNA, 20 bp, Homo sapiens
  source 1..20: mol_type = genomic DNA
ggctttacctccaatggtgc

SEQ ID NO: 901 - DNA, 20 bp, Homo sapiens
  source 1..20: mol_type = genomic DNA
cagtacctggcctcactttc

SEQ ID NO: 902 - RNA, 20 nt, synthetic construct
  source 1..20: mol_type = other RNA
acttctccacaggagtcagg

SEQ ID NO: 903 - RNA, 20 nt, synthetic construct
  source 1..20: mol_type = other RNA
gtggggaaggggcccccaag

SEQ ID NO: 904 - RNA, 20 nt, synthetic construct
  source 1..20: mol_type = other RNA
attgagatagtgtggggaag

SEQ ID NO: 905 - RNA, 20 nt, synthetic construct
  source 1..20: mol_type = other RNA
cattgagatagtgtggggaa

SEQ ID NO: 906 - RNA, 20 nt, synthetic construct
  source 1..20: mol_type = other RNA
gcattgagatagtgtgggga

SEQ ID NO: 907 - RNA, 20 nt, synthetic construct
  source 1..20: mol_type = other RNA
gtggggaaggggcccccaag

SEQ ID NO: 908 - RNA, 20 nt, synthetic construct
  source 1..20: mol_type = other RNA
gctattggtcaaggcaaggc

SEQ ID NO: 909 - RNA, 20 nt, synthetic construct
  source 1..20: mol_type = other RNA
caaggctattggtcaaggca

SEQ ID NO: 910 - RNA, 20 nt, synthetic construct
  source 1..20: mol_type = other RNA
cttgtcaaggctattggtca

SEQ ID NO: 911 - RNA, 20 nt, synthetic construct
  source 1..20: mol_type = other RNA
cttgaccaatagccttgaca

SEQ ID NO: 912 - RNA, 20 nt, synthetic construct
  source 1..20: mol_type = other RNA
gtttgccttgtcaaggctat

SEQ ID NO: 913 - RNA, 20 nt, synthetic construct
  source 1..20: mol_type = other RNA
tggtcaagtttgccttgtca

SEQ ID NO: 914 - RNA, 20 nt, synthetic construct
  source 1..20: mol_type = other RNA
tggggaaggggcccccaaga

SEQ ID NO: 915 - RNA, 20 nt, synthetic construct
  source 1..20: mol_type = other RNA
gtgtggggaaggggccccca

SEQ ID NO: 916 - RNA, 20 nt, synthetic construct
  source 1..20: mol_type = other RNA
tcagacagatatttgcattg

SEQ ID NO: 917 - RNA, 20 nt, synthetic construct
  source 1..20: mol_type = other RNA
tttcagacagatatttgcat

SEQ ID NO: 918 - RNA, 20 nt, synthetic construct
  source 1..20: mol_type = other RNA
cttgccttgaccaatagcct

SEQ ID NO: 919 - RNA, 20 nt, synthetic construct
  source 1..20: mol_type = other RNA
tagccttgacaaggcaaact

SEQ ID NO: 920 - RNA, 20 nt, synthetic construct
  source 1..20: mol_type = other RNA
caaacttgaccaatagtctt

SEQ ID NO: 921 - RNA, 20 nt, synthetic construct
  source 1..20: mol_type = other RNA
tgtggggaaggggcccccaa

SEQ ID NO: 922 - RNA, 20 nt, synthetic construct
  source 1..20: mol_type = other RNA
gggccccttccccacactat

SEQ ID NO: 923 - RNA, 20 nt, synthetic construct
  source 1..20: mol_type = other RNA
cagacagatatttgcattga

SEQ ID NO: 924 - RNA, 20 nt, synthetic construct
  source 1..20: mol_type = other RNA
tttcagacagatatttgcat

SEQ ID NO: 925 - RNA, 20 nt, synthetic construct
  source 1..20: mol_type = other RNA
gccttgacaaggcaaacttg

SEQ ID NO: 926 - RNA, 20 nt, synthetic construct
  source 1..20: mol_type = other RNA
ttgacaaggcaaacttgacc

SEQ ID NO: 927 - RNA, 20 nt, synthetic construct
  source 1..20: mol_type = other RNA
tgaccaatagtcttagagta

SEQ ID NO: 928 - RNA, 23 nt, synthetic construct
  source 1..23: mol_type = other RNA
agacagatatttgcattgagata

SEQ ID NO: 929 - protein, 1588 aa, synthetic construct
MSEVEFSHEYWMRHALTLAKRARDEREVPVGAVLVLNNRVIGEGWNRAIGLHDPTAHAEIMALRQGGLVMQNYRLYDATLYSTFEPCVMCAGAMIHSRIGRVVFGVRNAKTGAAGSLMDVLHHPGMNHRVEITEGILADECAALLCRFYRMPRRVFNAQKKAQSSTDSGGSSGGSSGSETPGTSESATPESSGGSSGGSDKKYSIGLAIGTNSVGWAVITDEYKVPSKKFKVLGNTDRHSIKKNLIGALLFDSGETAEATRLKRTARRRYTRRKNRICYLQEIFSNEMAKVDDSFFHRLEESFLVEEDKKHERHPIFGNIVDEVAYHEKYPTIYHLRKKLVDSTDKADLRLIYLALAHMIKFRGHFLIEGDLNPDNSDVDKLFIQLVQTYNQLFEENPINASGVDAKAILSARLSKSRRLENLIAQLPGEKKNGLFGNLIALSLGLTPNFKSNFDLAEDAKLQLSKDTYDDDLDNLLAQIGDQYADLFLAAKNLSDAILLSDILRVNTEITKAPLSASMVKRYDEHHQDLTLLKALVRQQLPEKYKEIFFDQSKNGYAGYIDGGASQEEFYKFIKPILEKMDGTEELLVKLNREDLLRKQRTFDNGIIPHQIHLGELHAILRRQGDFYPFLKDNREKIEKILTFRIPYYVGPLARGNSRFAWMTRKSEETITPWNFEEVVDKGASAQSFIERMTNFDKNLPNEKVLPKHSLLYEYFTVYNELTKVKYVTEGMRKPAFLSGEQKKAIVDLLFKTNRKVTVKQLKEDYFKKIECFDSVEISGVEDRFNASLGTYHDLLKIIKDKDFLDNEENEDILEDIVLTLTLFEDREMIEERLKTYAHLFDDKVMKQLKRLRYTGWGRLSRKLINGIRDKQSGKTILDFLKSDGFANRNFMQLIHDDSLTFKEDIQKAQVSGQGDSLHEHIANLAGSPAIKKGILQTVKVVDELVKVMGGHKPENIVIEMARENQTTQKGQKNSRERMKRIEEGIKELGSQILKEHPVENTQLQNEKLYLYYLQNGRDMYVDQELDINRLSDYDVDHIVPQSFLKDDSIDNKVLTRSDKNRGKSDNVPSEEVVKKMKNYWRQLLNAKLITQRKFDNLTKAERGGLSELDKAGFIKRQLVETRQITKHVAQILDSRMNTKYDENDKLIREVKVITLKSKLVSDFRKDFQFYKVREINNYHHAHDAYLNAVVGTALIKKYPKLESEFVYGDYKVYDVRKMIAKSEQEIGKATAKYFFYSNIMNFFKTEITLANGEIRKRPLIETNGETGEIVWDKGRDFATVRKVLSMPQVNIVKKTEVQTGGFSKESILPKGNSDKLIARKKDWDPKKYGGFNSPTVAYSVLVVAKVEKGKSKKLKSVKELLGITIMERSSFEKNPIDFLEAKGYKEVKKDLIIKLPKYSLFELENGRKRMLASAGVLQKGNELALPSKYVNFLYLASHYEKLKGSPEDNEQKQLFVEQHKHYLDEIIEQISEFSKRVILADANLDKVLSAYNKHRDKPIREQAENIIHLFTLTNLGAPAAFKYFDTTINRKQYNTTKEVLDATLIRQSITGLYETRIDLSQLGGDEGADKRTADGSEFESPKKKRKV

SEQ ID NO: 930 - DNA, 4831 bp, synthetic construct
  source 1..4831: mol_type = other DNA
taatacgactcactataaggaaataagagagaaaagaagagtaagaagaaatataagagccaccatgtccgaagtcgagttttcccatgagtactggatgagacacgcattgactctcgcaaagagggctcgagatgaacgcgaggtgcccgtgggggcagtactcgtgctcaacaatcgcgtaatcggcgaaggttggaatagggcaatcggactccacgaccccactgcacatgcggaaatcatggcccttcgacagggagggcttgtgatgcagaattatcgactttatgatgcgacgctgtactcgacgtttgaaccttgcgtaatgtgcgcgggagctatgattcactcccgcattggacgagttgtattcggtgttcgcaacgccaagacgggtgccgcaggttcactgatggacgtgctgcatcatccaggcatgaaccaccgggtagaaatcacagaaggcatattggcggacgaatgtgcggcgctgttgtgtcgtttttatcgcatgcccaggcgtgtctttaacgcccagaaaaaagcacaatcctctactgactccggcggaagcagcggaggatcttctggaagcgaaaccccaggcaccagcgagtctgccacaccagaatcatctggcggtagctccggcggcagcgacaagaagtattctatcggactggccatcggcaccaactctgttggatgggccgtgatcaccgacgagtacaaggtgcccagcaagaaattcaaggtgctgggcaacaccgacaggcacagcatcaagaagaacctgatcggcgcactgctgttcgactctggcgaaacagccgaggccaccagactgaagagaacagcccgcagacggtacaccagaagaaagaaccggatctgctacctccaagagatcttcagcaacgagatggccaaggtggacgacagcttcttccacagactggaagagtccttcctggtggaagaggacaagaagcacgagagacaccccatcttcggcaacatcgtggacgaggtggcctaccacgagaagtaccccaccatctaccacctgagaaagaaactggtggacagcaccgacaaggccgacctgagactgatctatctggccctggctcacatgatcaagttccggggccacttcctgatcgagggcgacctgaatcctgacaacagcgacgtggacaagctgttcatccagctggtgcagacctacaaccagctgttcgaggaaaaccccatcaacgccagcggagtggatgccaaggccatcctgtctgccagactgagcaagagcagacggctggaaaatctgatcgcccagctgcctggcgagaagaagaatggcctgttcggcaacctgattgccctgagcctgggcctgacacctaacttcaagagcaacttcgacctggccgaggacgccaaactgcagctgagcaaggacacctacgacgacgacctggacaatctgctggcccagatcggcgatcagtacgccgacttgtttctggccgccaagaatctgagcgacgccatcctgctgtccgacatcctgagagtgaacaccgagatcaccaaggcacctctgagcgcctctatggtcaagagatacgacgagcaccaccaggatctgaccctgctgaaggccctcgttagacagcagctgccagagaagtacaaagagattttcttcgaccagagcaagaacggctacgccggctacattgatggcggagccagccaagaggaattctacaagttcatcaagcccatcctcgagaagatggacggcaccgaggaactgctggtcaagctgaacagagaggacctgctgagaaagcagagaaccttcgacaacggcatcatccctcaccagatccacctgggagaactgcacgccattctgcggagacaaggggacttttacccattcctgaaggacaaccgggaaaagatcgagaaaatcctgaccttcaggatcccctactacgtgggaccactggccagaggcaatagcagattcgcctggatgaccagaaagagcgaggaaaccatcactccctggaacttcgaggaagtggtggacaagggcgccagcgctcagtccttcatcgagcggatgaccaacttcgataagaacctgcctaacgagaaggtgctgcccaagcacagcctgctgtacgagtacttcaccgtgtacaacgagctgaccaaagtgaaatacgtgaccgagggaatgagaaagcccgcctttctgagcggcgagcagaaaaaggccatcgtggatctgctgttcaagaccaaccggaaagtgaccgtgaagcagctgaaagaggactacttcaagaaaatcgagtgcttcgacagcgtcgagatctccggcgtggaagatcggttcaatgccagcctgggcacataccacgatctgctgaaaattatcaaggacaaggacttcctggacaacgaagagaacgaggacatccttgaggacatcgtgctgacactgaccctgtttgaggacagagagatgatcgaggaacggctgaaaacatacgcccacctgttcgacgacaaagtgatgaagcaactgaagcggctgagatacaccggctggggcagactgtctcggaagctgatcaacggcatccgggataagcagtccggcaagaccatcctggactttctgaagtccgacggcttcgccaacagaaacttcatgcagctgattcacgacgacagcctcaccttcaaagaggatatccagaaagcccaggtgtccggccagggcgattctctgcatgagcacattgccaacctggccggctctcccgccattaagaaaggcatcctgcagacagtgaaggtggtggacgagcttgtgaaagtgatgggcggacacaagcccgagaacatcgtgatcgaaatggccagagagaaccagaccacacagaagggacagaagaacagccgcgagagaatgaagcggatcgaagagggcatcaaagagctgggcagccagatcctgaaagaacaccccgtggaaaacacccagctgcagaacgagaagctgtacctgtactacctgcagaatggacgggatatgtacgtggaccaagagctggacatcaacagactgtccgactacgatgtggaccatatcgtgccccagtcttttctgaaggacgactccatcgacaacaaggtcctgaccagatccgacaagaatcggggcaagagcgacaacgtgccctccgaagaggtggtcaagaagatgaagaactactggcgacagctgctgaacgccaagctgattacccagcggaagttcgacaatctgaccaaggccgaaagaggcggcctgagcgaactggataaggccggcttcatcaagagacagctggtggaaacccggcagatcacaaagcacgtggcacagattctggactctcggatgaacactaagtacgacgagaacgacaaactgatccgcgaagtgaaagtcatcaccctgaagtccaagctggtgtccgatttccggaaggatttccagttctacaaagtgcgcgagatcaacaactaccatcacgcccacgacgcctacctgaatgccgttgttggaacagccctgatcaaaaagtaccctaagctggaaagcgagttcgtgtacggcgactacaaggtgtacgacgtgcggaagatgatcgccaagagcgagcaagagattggcaaggcaaccgccaagtacttcttctacagcaacatcatgaactttttcaagacagagatcaccctcgccaacggcgagatcagaaagcggcctctgatcgagacaaacggcgaaaccggcgagattgtgtgggataagggcagagactttgccacagtgcggaaagtgctgagcatgccccaagtgaatatcgtgaagaaaaccgaggtgcagacaggcggcttcagcaaagagtctatcctgcctaaggggaactccgacaagctgatcgccagaaagaaggactgggaccccaagaaatacggcggctttaactctcccaccgtggcctattctgttctggtggtggccaaagtggaaaagggcaagtccaagaaactcaagagcgtgaaagagctgctggggatcaccatcatggaaagaagcagcttcgagaagaatccgatcgatttcctcgaggccaagggttacaaagaagtgaaaaaggacctgatcatcaagctccccaagtactccctgttcgagctggaaaacggccggaagagaatgctggcctctgccggtgtcctgcagaagggaaacgaactggccctgcctagcaaatatgtgaacttcctgtacctggccagccactatgagaagctgaagggcagccccgaggacaatgagcaaaagcagctgtttgtggaacagcacaagcactacctggacgagatcatcgagcagatcagcgagtttagcaagagagtgattctggccgacgccaatctggacaaagtgctgtccgcctacaacaagcaccgggacaagcctatcagagagcaggccgagaatatcatccacctgtttaccctgaccaacctgggagcccctgcggccttcaagtactttgacaccaccatcaacaggaagcagtacaacaccaccaaagaggtgctggacgccactctgatccgccagtctatcaccggcctgtacgagacacggatcgacctgtctcaactcggaggcgacgaaggcgccgataagagaaccgccgatggctctgagttcgagagccctaagaaaaagcgcaaagtgtag

SEQ ID NO: 931 - protein, 1588 aa, synthetic construct
MSEVEFSHEYWMRHALTLAKRARDEREVPVGAVLVLNNRVIGEGWNRAIGLHDPTAHAEIMALRQGGLVMQNYRLYDATLYSTFEPCVMCAGAMIHSRIGRVVFGVRNAKTGAAGSLMDVLHHPGMNHRVEITEGILADECAALLCDFYRMPRRVFNAQKKAQSSINSGGSSGGSSGSETPGTSESATPESSGGSSGGSDKKYSIGLAIGTNSVGWAVITDEYKVPSKKFKVLGNTDRHSIKKNLIGALLFDSGETAEATRLKRTARRRYTRRKNRICYLQEIFSNEMAKVDDSFFHRLEESFLVEEDKKHERHPIFGNIVDEVAYHEKYPTIYHLRKKLVDSTDKADLRLIYLALAHMIKFRGHFLIEGDLNPDNSDVDKLFIQLVQTYNQLFEENPINASGVDAKAILSARLSKSRRLENLIAQLPGEKKNGLFGNLIALSLGLTPNFKSNFDLAEDAKLQLSKDTYDDDLDNLLAQIGDQYADLFLAAKNLSDAILLSDILRVNTEITKAPLSASMVKRYDEHHQDLTLLKALVRQQLPEKYKEIFFDQSKNGYAGYIDGGASQEEFYKFIKPILEKMDGTEELLVKLNREDLLRKQRTFDNGIIPHQIHLGELHAILRRQGDFYPFLKDNREKIEKILTFRIPYYVGPLARGNSRFAWMTRKSEETITPWNFEEVVDKGASAQSFIERMTNFDKNLPNEKVLPKHSLLYEYFTVYNELTKVKYVTEGMRKPAFLSGEQKKAIVDLLFKTNRKVTVKQLKEDYFKKIECFDSVEISGVEDRFNASLGTYHDLLKIIKDKDFLDNEENEDILEDIVLTLTLFEDREMIEERLKTYAHLFDDKVMKQLKRLRYTGWGRLSRKLINGIRDKQSGKTILDFLKSDGFANRNFMQLIHDDSLTFKEDIQKAQVSGQGDSLHEHIANLAGSPAIKKGILQTVKVVDELVKVMGGHKPENIVIEMARENQTTQKGQKNSRERMKRIEEGIKELGSQILKEHPVENTQLQNEKLYLYYLQNGRDMYVDQELDINRLSDYDVDHIVPQSFLKDDSIDNKVLTRSDKNRGKSDNVPSEEVVKKMKNYWRQLLNAKLITQRKFDNLTKAERGGLSELDKAGFIKRQLVETRQITKHVAQILDSRMNTKYDENDKLIREVKVITLKSKLVSDFRKDFQFYKVREINNYHHAHDAYLNAVVGTALIKKYPKLESEFVYGDYKVYDVRKMIAKSEQEIGKATAKYFFYSNIMNFFKTEITLANGEIRKRPLIETNGETGEIVWDKGRDFATVRKVLSMPQVNIVKKTEVQTGGFSKESILPKGNSDKLIARKKDWDPKKYGGFNSPTVAYSVLVVAKVEKGKSKKLKSVKELLGITIMERSSFEKNPIDFLEAKGYKEVKKDLIIKLPKYSLFELENGRKRMLASAGVLQKGNELALPSKYVNFLYLASHYEKLKGSPEDNEQKQLFVEQHKHYLDEIIEQISEFSKRVILADANLDKVLSAYNKHRDKPIREQAENIIHLFTLTNLGAPAAFKYFDTTINRKQYNTTKEVLDATLIRQSITGLYETRIDLSQLGGDEGADKRTADGSEFESPKKKRKV

SEQ ID NO: 932 - DNA, 4831 bp, synthetic construct
  source 1..4831: mol_type = other DNA
taatacgactcactataaggaaataagagagaaaagaagagtaagaagaaatataagagccaccatgtccgaagtcgagttttcccatgagtactggatgagacacgcattgactctcgcaaagagggctcgagatgaacgcgaggtgcccgtgggggcagtactcgtgctcaacaatcgcgtaatcggcgaaggttggaatagggcaatcggactccacgaccccactgcacatgcggaaatcatggcccttcgacagggagggcttgtgatgcagaattatcgactttatgatgcgacgctgtactcgacgtttgaaccttgcgtaatgtgcgcgggagctatgattcactcccgcattggacgagttgtattcggtgttcgcaacgccaagacgggtgccgcaggttcactgatggacgtgctgcatcatccaggcatgaaccaccgggtagaaatcacagaaggcatattggcggacgaatgtgcggcgctgttgtgtgacttttatcgcatgcccaggcgtgtctttaacgcccagaaaaaagcacaatcctctataaactccggcggaagcagcggaggatcttctggaagcgaaaccccaggcaccagcgagtctgccacaccagaatcatctggcggtagctccggcggcagcgacaagaagtattctatcggactggccatcggcaccaactctgttggatgggccgtgatcaccgacgagtacaaggtgcccagcaagaaattcaaggtgctgggcaacaccgacaggcacagcatcaagaagaacctgatcggcgcactgctgttcgactctggcgaaacagccgaggccaccagactgaagagaacagcccgcagacggtacaccagaagaaagaaccggatctgctacctccaagagatcttcagcaacgagatggccaaggtggacgacagcttcttccacagactggaagagtccttcctggtggaagaggacaagaagcacgagagacaccccatcttcggcaacatcgtggacgaggtggcctaccacgagaagtaccccaccatctaccacctgagaaagaaactggtggacagcaccgacaaggccgacctgagactgatctatctggccctggctcacatgatcaagttccggggccacttcctgatcgagggcgacctgaatcctgacaacagcgacgtggacaagctgttcatccagctggtgcagacctacaaccagctgttcgaggaaaaccccatcaacgccagcggagtggatgccaaggccatcctgtctgccagactgagcaagagcagacggctggaaaatctgatcgcccagctgcctggcgagaagaagaatggcctgttcggcaacctgattgccctgagcctgggcctgacacctaacttcaagagcaacttcgacctggccgaggacgccaaactgcagctgagcaaggacacctacgacgacgacctggacaatctgctggcccagatcggcgatcagtacgccgacttgtttctggccgccaagaatctgagcgacgccatcctgctgtccgacatcctgagagtgaacaccgagatcaccaaggcacctctgagcgcctctatggtcaagagatacgacgagcaccaccaggatctgaccctgctgaaggccctcgttagacagcagctgccagagaagtacaaagagattttcttcgaccagagcaagaacggctacgccggctacattgatggcggagccagccaagaggaattctacaagttcatcaagcccatcctcgagaagatggacggcaccgaggaactgctggtcaagctgaacagagaggacctgctgagaaagcagagaaccttcgacaacggcatcatccctcaccagatccacctgggagaactgcacgccattctgcggagacaaggggacttttacccattcctgaaggacaaccgggaaaagatcgagaaaatcctgaccttcaggatcccctactacgtgggaccactggccagaggcaatagcagattcgcctggatgaccagaaagagcgaggaaaccatcactccctggaacttcgaggaagtggtggacaagggcgccagcgctcagtccttcatcgagcggatgaccaacttcgataagaacctgcctaacgagaaggtgctgcccaagcacagcctgctgtacgagtacttcaccgtgtacaacgagctgaccaaagtgaaatacgtgaccgagggaatgagaaagcccgcctttctgagcggcgagcagaaaaaggccatcgtggatctgctgttcaagaccaaccggaaagtgaccgtgaagcagctgaaagaggactacttcaagaaaatcgagtgcttcgacagcgtcgagatctccggcgtggaagatcggttcaatgccagcctgggcacataccacgatctgctgaaaattatcaaggacaaggacttcctggacaacgaagagaacgaggacatccttgaggacatcgtgctgacactgaccctgtttgaggacagagagatgatcgaggaacggctgaaaacatacgcccacctgttcgacgacaaagtgatgaagcaactgaagcggctgagatacaccggctggggcagactgtctcggaagctgatcaacggcatccgggataagcagtccggcaagaccatcctggactttctgaagtccgacggcttcgccaacagaaacttcatgcagctgattcacgacgacagcctcaccttcaaagaggatatccagaaagcccaggtgtccggccagggcgattctctgcatgagcacattgccaacctggccggctctcccgccattaagaaaggcatcctgcagacagtgaaggtggtggacgagcttgtgaaagtgatgggcggacacaagcccgagaacatcgtgatcgaaatggccagagagaaccagaccacacagaagggacagaagaacagccgcgagagaatgaagcggatcgaagagggcatcaaagagctgggcagccagatcctgaaagaacaccccgtggaaaacacccagctgcagaacgagaagctgtacctgtactacctgcagaatggacgggatatgtacgtggaccaagagctggacatcaacagactgtccgactacgatgtggaccatatcgtgccccagtcttttctgaaggacgactccatcgacaacaaggtcctgaccagatccgacaagaatcggggcaagagcgacaacgtgccctccgaagaggtggtcaagaagatgaagaactactggcgacagctgctgaacgccaagctgattacccagcggaagttcgacaatctgaccaaggccgaaagaggcggcctgagcgaactggataaggccggcttcatcaagagacagctggtggaaacccggcagatcacaaagcacgtggcacagattctggactctcggatgaacactaagtacgacgagaacgacaaactgatccgcgaagtgaaagtcatcaccctgaagtccaagctggtgtccgatttccggaaggatttccagttctacaaagtgcgcgagatcaacaactaccatcacgcccacgacgcctacctgaatgccgttgttggaacagccctgatcaaaaagtaccctaagctggaaagcgagttcgtgtacggcgactacaaggtgtacgacgtgcggaagatgatcgccaagagcgagcaagagattggcaaggcaaccgccaagtacttcttctacagcaacatcatgaactttttcaagacagagatcaccctcgccaacggcgagatcagaaagcggcctctgatcgagacaaacggcgaaaccggcgagattgtgtgggataagggcagagactttgccacagtgcggaaagtgctgagcatgccccaagtgaatatcgtgaagaaaaccgaggtgcagacaggcggcttcagcaaagagtctatcctgcctaaggggaactccgacaagctgatcgccagaaagaaggactgggaccccaagaaatacggcggctttaactctcccaccgtggcctattctgttctggtggtggccaaagtggaaaagggcaagtccaagaaactcaagagcgtgaaagagctgctggggatcaccatcatggaaagaagcagcttcgagaagaatccgatcgatttcctcgaggccaagggttacaaagaagtgaaaaaggacctgatcatcaagctccccaagtactccctgttcgagctggaaaacggccggaagagaatgctggcctctgccggtgtcctgcagaagggaaacgaactggccctgcctagcaaatatgtgaacttcctgtacctggccagccactatgagaagctgaagggcagccccgaggacaatgagcaaaagcagctgtttgtggaacagcacaagcactacctggacgagatcatcgagcagatcagcgagtttagcaagagagtgattctggccgacgccaatctggacaaagtgctgtccgcctacaacaagcaccgggacaagcctatcagagagcaggccgagaatatcatccacctgtttaccctgaccaacctgggagcccctgcggccttcaagtactttgacaccaccatcaacaggaagcagtacaacaccaccaaagaggtgctggacgccactctgatccgccagtctatcaccggcctgtacgagacacggatcgacctgtctcaactcggaggcgacgaaggcgccgataagagaaccgccgatggctctgagttcgagagccctaagaaaaagcgcaaagtgtag

SEQ ID NO: 933 - protein, 1554 aa, synthetic construct
MDKKYSIGLAIGTNSVGWAVITDEYKVPSKKFKVLGNTDRHSIKKNLIGALLFDSGETAEATRLKRTARRRYTRRKNRICYLQEIFSNEMAKVDDSFFHRLEESFLVEEDKKHERHPIFGNIVDEVAYHEKYPTIYHLRKKLVDSTDKADLRLIYLALAHMIKFRGHFLIEGDLNPDNSDVDKLFIQLVQTYNQLFEENPINASGVDAKAILSARLSKSRRLENLIAQLPGEKKNGLFGNLIALSLGLTPNFKSNFDLAEDAKLQLSKDTYDDDLDNLLAQIGDQYADLFLAAKNLSDAILLSDILRVNTEITKAPLSASMIKRYDEHHQDLTLLKALVRQQLPEKYKEIFFDQSKNGYAGYIDGGASQEEFYKFIKPILEKMDGTEELLVKLNREDLLRKQRTFDNGSIPHQIHLGELHAILRRQEDFYPFLKDNREKIEKILTFRIPYYVGPLARGNSRFAWMTRKSEETITPWNFEEVVDKGASAQSFIERMTNFDKNLPNEKVLPKHSLLYEYFTVYNELTKVKYVTEGMRKPAFLSGEQKKAIVDLLFKTNRKVTVKQLKEDYFKKIECFDSVEISGVEDRFNASLGTYHDLLKIIKDKDFLDNEENEDILEDIVLTLTLFEDREMIEERLKTYAHLFDDKVMKQLKRRRYTGWGRLSRKLINGIRDKQSGKTILDFLKSDGFANRNFMQLIHDDSLTFKEDIQKAQVSGQGDSLHEHIANLAGSPAIKKGILQTVKVVDELVKVMGRHKPENIVIEMARENQTTQKGQKNSRERMKRIEEGIKELGSQILKEHPVENTQLQNEKLYLYYLQNGRDMYVDQELDINRLSDYDVDHIVPQSFLKDDSIDNKVLTRSDKNRGKSDNVPSEEVVKKMKNYWRQLLNAKLITQRKFDNLTKAERGGLSELDKAGFIKRQLVETRQITKHVAQILDSRMNTKYDENDKLIREVKVITLKSKLVSDFRKDFQFYKVREINNYHHAHDAYLNAVVGTALIKKYPKLESEFVYGDYKVYDVRKMIAKSEQEIGSSGSETPGTSESATPESSGSEVEFSHEYWMRHALTLAKRARDEREVPVGAVLVLNNRVIGEGWNRAIGLHDPTAHAEIMALRQGGLVMQNYRLIDATLYSTFEPCVMCAGAMIHSRIGRVVFGVRNAKTGAAGSLMDVLHYPGMNHRVEITEGILADECAALLCYFFRMPRQVFNAQKKAQSSTDGKATAKYFFYSNIMNFFKTEITLANGEIRKRPLIETNGETGEIVWDKGRDFATVRKVLSMPQVNIVKKTEVQTGGFSKESILPKRNSDKLIARKKDWDPKKYGGFMQPTVAYSVLVVAKVEKGKSKKLKSVKELLGITIMERSSFEKNPIDFLEAKGYKEVKKDLIIKLPKYSLFELENGRKRMLASAKFLQKGNELALPSKYVNFLYLASHYEKLKGSPEDNEQKQLFVEQHKHYLDEIIEQISEFSKRVILADANLDKVLSAYNKHRDKPIREQAENIIHLFTLTNLGAPRAFKYFDTTIARKEYRSTKEVLDATLIHQSITGLYETRIDLSQLGGD

SEQ ID NO: 934 - protein, 1588 aa, synthetic construct
MSEVEFSHEYWMRHALTLAKRARDEREVPVGAVLVLNNRVIGEGWNRAIGLHDPTAHAEIMALRQGGLVMQNYRLYDATLYTTFEPCVMCAGAMIHSRIGRVVFGVRNAKTGAAGSLMDVLHHPGMNHRVEITEGILADECAALLCRFYRMPRRVFNAQKKAQSSTDSGGSSGGSSGSETPGTSESATPESSGGSSGGSDKKYSIGLAIGTNSVGWAVITDEYKVPSKKFKVLGNTDRHSIKKNLIGALLFDSGETAEATRLKRTARRRYTRRKNRICYLQEIFSNEMAKVDDSFFHRLEESFLVEEDKKHERHPIFGNIVDEVAYHEKYPTIYHLRKKLVDSTDKADLRLIYLALAHMIKFRGHFLIEGDLNPDNSDVDKLFIQLVQTYNQLFEENPINASGVDAKAILSARLSKSRRLENLIAQLPGEKKNGLFGNLIALSLGLTPNFKSNFDLAEDAKLQLSKDTYDDDLDNLLAQIGDQYADLFLAAKNLSDAILLSDILRVNTEITKAPLSASMVKRYDEHHQDLTLLKALVRQQLPEKYKEIFFDQSKNGYAGYIDGGASQEEFYKFIKPILEKMDGTEELLVKLNREDLLRKQRTFDNGIIPHQIHLGELHAILRRQGDFYPFLKDNREKIEKILTFRIPYYVGPLARGNSRFAWMTRKSEETITPWNFEEVVDKGASAQSFIERMTNFDKNLPNEKVLPKHSLLYEYFTVYNELTKVKYVTEGMRKPAFLSGEQKKAIVDLLFKTNRKVTVKQLKEDYFKKIECFDSVEISGVEDRFNASLGTYHDLLKIIKDKDFLDNEENEDILEDIVLTLTLFEDREMIEERLKTYAHLFDDKVMKQLKRLRYTGWGRLSRKLINGIRDKQSGKTILDFLKSDGFANRNFMQLIHDDSLTFKEDIQKAQVSGQGDSLHEHIANLAGSPAIKKGILQTVKVVDELVKVMGGHKPENIVIEMARENQTTQKGQKNSRERMKRIEEGIKELGSQILKEHPVENTQLQNEKLYLYYLQNGRDMYVDQELDINRLSDYDVDHIVPQSFLKDDSIDNKVLTRSDKNRGKSDNVPSEEVVKKMKNYWRQLLNAKLITQRKFDNLTKAERGGLSELDKAGFIKRQLVETRQITKHVAQILDSRMNTKYDENDKLIREVKVITLKSKLVSDFRKDFQFYKVREINNYHHAHDAYLNAVVGTALIKKYPKLESEFVYGDYKVYDVRKMIAKSEQEIGKATAKYFFYSNIMNFFKTEITLANGEIRKRPLIETNGETGEIVWDKGRDFATVRKVLSMPQVNIVKKTEVQTGGFSKESILPKGNSDKLIARKKDWDPKKYGGFNSPTVAYSVLVVAKVEKGKSKKLKSVKELLGITIMERSSFEKNPIDFLEAKGYKEVKKDLIIKLPKYSLFELENGRKRMLASAGVLQKGNELALPSKYVNFLYLASHYEKLKGSPEDNEQKQLFVEQHKHYLDEIIEQISEFSKRVILADANLDKVLSAYNKHRDKPIREQAENIIHLFTLTNLGAPAAFKYFDTTINRKQYNTTKEVLDATLIRQSITGLYETRIDLSQLGGDEGADKRTADGSEFESPKKKRKV

SEQ ID NO: 935 - protein, 1588 aa, synthetic construct
MSEVEFSHEYWMRHALTLAKRARDEREVPVGAVLVLNNRVIGEGWNRAIGLHDPTAHAEIMALRQGGLVMQNYRLYDATLYTTFEPCVMCAGAMIHSRIGRVVFGVRNAKTGAAGSLMDVLHHPGMNHRVEITEGILADECAALLCDFYRMPRRVFNAQKKAQSSINSGGSSGGSSGSETPGTSESATPESSGGSSGGSDKKYSIGLAIGTNSVGWAVITDEYKVPSKKFKVLGNTDRHSIKKNLIGALLFDSGETAEATRLKRTARRRYTRRKNRICYLQEIFSNEMAKVDDSFFHRLEESFLVEEDKKHERHPIFGNIVDEVAYHEKYPTIYHLRKKLVDSTDKADLRLIYLALAHMIKFRGHFLIEGDLNPDNSDVDKLFIQLVQTYNQLFEENPINASGVDAKAILSARLSKSRRLENLIAQLPGEKKNGLFGNLIALSLGLTPNFKSNFDLAEDAKLQLSKDTYDDDLDNLLAQIGDQYADLFLAAKNLSDAILLSDILRVNTEITKAPLSASMVKRYDEHHQDLTLLKALVRQQLPEKYKEIFFDQSKNGYAGYIDGGASQEEFYKFIKPILEKMDGTEELLVKLNREDLLRKQRTFDNGIIPHQIHLGELHAILRRQGDFYPFLKDNREKIEKILTFRIPYYVGPLARGNSRFAWMTRKSEETITPWNFEEVVDKGASAQSFIERMTNFDKNLPNEKVLPKHSLLYEYFTVYNELTKVKYVTEGMRKPAFLSGEQKKAIVDLLFKTNRKVTVKQLKEDYFKKIECFDSVEISGVEDRFNASLGTYHDLLKIIKDKDFLDNEENEDILEDIVLTLTLFEDREMIEERLKTYAHLFDDKVMKQLKRLRYTGWGRLSRKLINGIRDKQSGKTILDFLKSDGFANRNFMQLIHDDSLTFKEDIQKAQVSGQGDSLHEHIANLAGSPAIKKGILQTVKVVDELVKVMGGHKPENIVIEMARENQTTQKGQKNSRERMKRIEEGIKELGSQILKEHPVENTQLQNEKLYLYYLQNGRDMYVDQELDINRLSDYDVDHIVPQSFLKDDSIDNKVLTRSDKNRGKSDNVPSEEVVKKMKNYWRQLLNAKLITQRKFDNLTKAERGGLSELDKAGFIKRQLVETRQITKHVAQILDSRMNTKYDENDKLIREVKVITLKSKLVSDFRKDFQFYKVREINNYHHAHDAYLNAVVGTALIKKYPKLESEFVYGDYKVYDVRKMIAKSEQEIGKATAKYFFYSNIMNFFKTEITLANGEIRKRPLIETNGETGEIVWDKGRDFATVRKVLSMPQVNIVKKTEVQTGGFSKESILPKGNSDKLIARKKDWDPKKYGGFNSPTVAYSVLVVAKVEKGKSKKLKSVKELLGITIMERSSFEKNPIDFLEAKGYKEVKKDLIIKLPKYSLFELENGRKRMLASAGVLQKGNELALPSKYVNFLYLASHYEKLKGSPEDNEQKQLFVEQHKHYLDEIIEQISEFSKRVILADANLDKVLSAYNKHRDKPIREQAENIIHLFTLTNLGAPAAFKYFDTTINRKQYNTTKEVLDATLIRQSITGLYETRIDLSQLGGDEGADKRTADGSEFESPKKKRKV

SEQ ID NO: 936 - DNA, 27 bp, synthetic construct
  source 1..27: mol_type = other DNA
tcgagctcggtacctaatacgactcac

SEQ ID NO: 937 - DNA, 149 bp, synthetic construct
  source 1..149: mol_type = other DNA
ttttttttttttttttttttttttttttttttttttttttttttttttttttttttttttttttttttttttttttttttttttttttttttttttttttttttttttttttttttttttcttcctactcaggctttattcaaagacca

SEQ ID NO: 938 - protein, 1365 aa, synthetic construct
DKKYSIGLAIGTNSVGWAVITDEYKVPSKKFKVLGNTDRHSIKKNLIGALLFDSGETAEATRLKRTARRRYTRRKNRICYLQEIFSNEMAKVDDSFFHRLEESFLVEEDKKHERHPIFGNIVDEVAYHEKYPTIYHLRKKLVDSTDKADLRLIYLALAHMIKFRGHFLIEGDLNPDNSDVDKLFIQLVQTYNQLFEENPINASGVDAKAILSARLSKSRRLENLIAQLPGEKKNGLFGNLIALSLGLTPNFKSNFDLAEDAKLQLSKDTYDDDLDNLLAQIGDQYADLFLAAKNLSDAILLSDILRVNTEITKAPLSASMVKRYDEHHQDLTLLKALVRQQLPEKYKEIFFDQSKNGYAGYIDGGASQEEFYKFIKPILEKMDGTEELLVKLNREDLLRKQRTFDNGIIPHQIHLGELHAILRRQGDFYPFLKDNREKIEKILTFRIPYYVGPLARGNSRFAWMTRKSEETITPWNFEEVVDKGASAQSFIERMTNFDKNLPNEKVLPKHSLLYEYFTVYNELTKVKYVTEGMRKPAFLSGEQKKAIVDLLFKTNRKVTVKQLKEDYFKKIECFDSVEISGVEDRFNASLGTYHDLLKIIKDKDFLDNEENEDILEDIVLTLTLFEDREMIEERLKTYAHLFDDKVMKQLKRLRYTGWGRLSRKLINGIRDKQSGKTILDFLKSDGFANRNFMQLIHDDSLTFKEDIQKAQVSGQGDSLHEHIANLAGSPAIKKGILQTVKVVDELVKVMGGHKPENIVIEMARENQTTQKGQKNSRERMKRIEEGIKELGSQILKEHPVENTQLQNEKLYLYYLQNGRDMYVDQELDINRLSDYDVDHIVPQSFLKDDSIDNKVLTRSDKNRGKSDNVPSEEVVKKMKNYWRQLLNAKLITQRKFDNLTKAERGGLSELDKAGFIKRQLVETRQITKHVAQILDSRMNTKYDENDKLIREVKVITLKSKLVSDFRKDFQFYKVREINNYHHAHDAYLNAVVGTALIKKYPKLESEFVYGDYKVYDVRKMIAKSEQEIGKATAKYFFYSNIMNFFKTEITLANGEIRKRPLIETNGETGEIVWDKGRDFATVRKVLSMPQVNIVKKTEVQTGGFSKESILPKGNSDKLIARKKDWDPKKYGGFNSPTVAYSVLVVAKVEKGKSKKLKSVKELLGITIMERSSFEKNPIDFLEAKGYKEVKKDLIIKLPKYSLFELENGRKRMLASAGVLQKGNELALPSKYVNFLYLASHYEKLKGSPEDNEQKQLFVEQHKHYLDEIIEQISEFSKRVILADANLDKVLSAYNKHRDKPIREQAENIIHLFTLTNLGAPAAFKYFDTTINRKQYNTTKEVLDATLIRQSITGLYETRIDLSQLG

SEQ ID NO: 939 - protein, 8 aa, synthetic construct
RASQSVSS

SEQ ID NO: 940 - DNA, 1608 bp, Homo sapiens
  source 1..1608: mol_type = genomic DNA
acatttgcttctgacacaactgtgttcactagcaacctcaaacagacaccatggtgcatctgactcctgaggagaagtctgccgttactgccctgtggggcaaggtgaacgtggatgaagttggtggtgaggccctgggcaggttggtatcaaggttacaagacaggtttaaggagaccaatagaaactgggcatgtggagacagagaagactcttgggtttctgataggcactgactctctctgcctattggtctattttcccacccttaggctgctggtggtctacccttggacccagaggttctttgagtcctttggggatctgtccactcctgatgctgttatgggcaaccctaaggtgaaggctcatggcaagaaagtgctcggtgcctttagtgatggcctggctcacctggacaacctcaagggcacctttgccacactgagtgagctgcactgtgacaagctgcacgtggatcctgagaacttcagggtgagtctatgggacgcttgatgttttctttccccttcttttctatggttaagttcatgtcataggaaggggataagtaacagggtacagtttagaatgggaaacagacgaatgattgcatcagtgtggaagtctcaggatcgttttagtttcttttatttgctgttcataacaattgttttcttttgtttaattcttgctttctttttttttcttctccgcaatttttactattatacttaatgccttaacattgtgtataacaaaaggaaatatctctgagatacattaagtaacttaaaaaaaaactttacacagtctgcctagtacattactatttggaatatatgtgtgcttatttgcatattcataatctccctactttattttcttttatttttaattgatacataatcattatacatatttatgggttaaagtgtaatgttttaatatgtgtacacatattgaccaaatcagggtaattttgcatttgtaattttaaaaaatgctttcttcttttaatatacttttttgtttatcttatttctaatactttccctaatctctttctttcagggcaataatgatacaatgtatcatgcctctttgcaccattctaaagaataacagtgataatttctgggttaaggcaatagcaatatctctgcatataaatatttctgcatataaattgtaactgatgtaagaggtttcatattgctaatagcagctacaatccagctaccattctgcttttattttatggttgggataaggctggattattctgagtccaagctaggcccttttgctaatcatgttcatacctcttatcttcctcccacagctcctgggcaacgtgctggtctgtgtgctggcccatcactttggcaaagaattcaccccaccagtgcaggctgcctatcagaaagtggtggctggtgtggctaatgccctggcccacaagtatcactaagctcgctttcttgctgtccaatttctattaaaggttcctttgttccctaagtccaactactaaactgggggatattatgaagggccttgagcatctggattctgcctaataaaaaacatttattttcattgcaa

SEQ ID NO: 941 - RNA, 20 nt, synthetic construct
  source 1..20: mol_type = other RNA
ttctccacaggagtcaggtg

SEQ ID NO: 942 - DNA, 4767 bp, synthetic construct
  source 1..4767: mol_type = other DNA
atgtccgaagtcgagttttcccatgagtactggatgagacacgcattgactctcgcaaagagggctcgagatgaacgcgaggtgcccgtgggggcagtactcgtgctcaacaatcgcgtaatcggcgaaggttggaatagggcaatcggactccacgaccccactgcacatgcggaaatcatggcccttcgacagggagggcttgtgatgcagaattatcgactttatgatgcgacgctgtacaccacgtttgaaccttgcgtaatgtgcgcgggagctatgattcactcccgcattggacgagttgtattcggtgttcgcaacgccaagacgggtgccgcaggttcactgatggacgtgctgcatcatccaggcatgaaccaccgggtagaaatcacagaaggcatattggcggacgaatgtgcggcgctgttgtgtcgtttttatcgcatgcccaggcgtgtctttaacgcccagaaaaaagcacaatcctctactgactccggcggaagcagcggaggatcttctggaagcgaaaccccaggcaccagcgagtctgccacaccagaatcatctggcggtagctccggcggcagcgacaagaagtattctatcggactggccatcggcaccaactctgttggatgggccgtgatcaccgacgagtacaaggtgcccagcaagaaattcaaggtgctgggcaacaccgacaggcacagcatcaagaagaacctgatcggcgcactgctgttcgactctggcgaaacagccgaggccaccagactgaagagaacagcccgcagacggtacaccagaagaaagaaccggatctgctacctccaagagatcttcagcaacgagatggccaaggtggacgacagcttcttccacagactggaagagtccttcctggtggaagaggacaagaagcacgagagacaccccatcttcggcaacatcgtggacgaggtggcctaccacgagaagtaccccaccatctaccacctgagaaagaaactggtggacagcaccgacaaggccgacctgagactgatctatctggccctggctcacatgatcaagttccggggccacttcctgatcgagggcgacctgaatcctgacaacagcgacgtggacaagctgttcatccagctggtgcagacctacaaccagctgttcgaggaaaaccccatcaacgccagcggagtggatgccaaggccatcctgtctgccagactgagcaagagcagacggctggaaaatctgatcgcccagctgcctggcgagaagaagaatggcctgttcggcaacctgattgccctgagcctgggcctgacacctaacttcaagagcaacttcgacctggccgaggacgccaaactgcagctgagcaaggacacctacgacgacgacctggacaatctgctggcccagatcggcgatcagtacgccgacttgtttctggccgccaagaatctgagcgacgccatcctgctgtccgacatcctgagagtgaacaccgagatcaccaaggcacctctgagcgcctctatggtcaagagatacgacgagcaccaccaggatctgaccctgctgaaggccctcgttagacagcagctgccagagaagtacaaagagattttcttcgaccagagcaagaacggctacgccggctacattgatggcggagccagccaagaggaattctacaagttcatcaagcccatcctcgagaagatggacggcaccgaggaactgctggtcaagctgaacagagaggacctgctgagaaagcagagaaccttcgacaacggcatcatccctcaccagatccacctgggagaactgcacgccattctgcggagacaaggggacttttacccattcctgaaggacaaccgggaaaagatcgagaaaatcctgaccttcaggatcccctactacgtgggaccactggccagaggcaatagcagattcgcctggatgaccagaaagagcgaggaaaccatcactccctggaacttcgaggaagtggtggacaagggcgccagcgctcagtccttcatcgagcggatgaccaacttcgataagaacctgcctaacgagaaggtgctgcccaagcacagcctgctgtacgagtacttcaccgtgtacaacgagctgaccaaagtgaaatacgtgaccgagggaatgagaaagcccgcctttctgagcggcgagcagaaaaaggccatcgtggatctgctgttcaagaccaaccggaaagtgaccgtgaagcagctgaaagaggactacttcaagaaaatcgagtgcttcgacagcgtcgagatctccggcgtggaagatcggttcaatgccagcctgggcacataccacgatctgctgaaaattatcaaggacaaggacttcctggacaacgaagagaacgaggacatccttgaggacatcgtgctgacactgaccctgtttgaggacagagagatgatcgaggaacggctgaaaacatacgcccacctgttcgacgacaaagtgatgaagcaactgaagcggctgagatacaccggctggggcagactgtctcggaagctgatcaacggcatccgggataagcagtccggcaagaccatcctggactttctgaagtccgacggcttcgccaacagaaacttcatgcagctgattcacgacgacagcctcaccttcaaagaggatatccagaaagcccaggtgtccggccagggcgattctctgcatgagcacattgccaacctggccggctctcccgccattaagaaaggcatcctgcagacagtgaaggtggtggacgagcttgtgaaagtgatgggcggacacaagcccgagaacatcgtgatcgaaatggccagagagaaccagaccacacagaagggacagaagaacagccgcgagagaatgaagcggatcgaagagggcatcaaagagctgggcagccagatcctgaaagaacaccccgtggaaaacacccagctgcagaacgagaagctgtacctgtactacctgcagaatggacgggatatgtacgtggaccaagagctggacatcaacagactgtccgactacgatgtggaccatatcgtgccccagtcttttctgaaggacgactccatcgacaacaaggtcctgaccagatccgacaagaatcggggcaagagcgacaacgtgccctccgaagaggtggtcaagaagatgaagaactactggcgacagctgctgaacgccaagctgattacccagcggaagttcgacaatctgaccaaggccgaaagaggcggcctgagcgaactggataaggccggcttcatcaagagacagctggtggaaacccggcagatcacaaagcacgtggcacagattctggactctcggatgaacactaagtacgacgagaacgacaaactgatccgcgaagtgaaagtcatcaccctgaagtccaagctggtgtccgatttccggaaggatttccagttctacaaagtgcgcgagatcaacaactaccatcacgcccacgacgcctacctgaatgccgttgttggaacagccctgatcaaaaagtaccctaagctggaaagcgagttcgtgtacggcgactacaaggtgtacgacgtgcggaagatgatcgccaagagcgagcaagagattggcaaggcaaccgccaagtacttcttctacagcaacatcatgaactttttcaagacagagatcaccctcgccaacggcgagatcagaaagcggcctctgatcgagacaaacggcgaaaccggcgagattgtgtgggataagggcagagactttgccacagtgcggaaagtgctgagcatgccccaagtgaatatcgtgaagaaaaccgaggtgcagacaggcggcttcagcaaagagtctatcctgcctaaggggaactccgacaagctgatcgccagaaagaaggactgggaccccaagaaatacggcggctttaactctcccaccgtggcctattctgttctggtggtggccaaagtggaaaagggcaagtccaagaaactcaagagcgtgaaagagctgctggggatcaccatcatggaaagaagcagcttcgagaagaatccgatcgatttcctcgaggccaagggttacaaagaagtgaaaaaggacctgatcatcaagctccccaagtactccctgttcgagctggaaaacggccggaagagaatgctggcctctgccggtgtcctgcagaagggaaacgaactggccctgcctagcaaatatgtgaacttcctgtacctggccagccactatgagaagctgaagggcagccccgaggacaatgagcaaaagcagctgtttgtggaacagcacaagcactacctggacgagatcatcgagcagatcagcgagtttagcaagagagtgattctggccgacgccaatctggacaaagtgctgtccgcctacaacaagcaccgggacaagcctatcagagagcaggccgagaatatcatccacctgtttaccctgaccaacctgggagcccctgcggccttcaagtactttgacaccaccatcaacaggaagcagtacaacaccaccaaagaggtgctggacgccactctgatccgccagtctatcaccggcctgtacgagacacggatcgacctgtctcaactcggaggcgacgaaggcgccgataagagaaccgccgatggctctgagttcgagagccctaagaaaaagcgcaaagtgtag

SEQ ID NO: 943 - DNA, 4767 bp, synthetic construct
  source 1..4767: mol_type = other DNA
atgtccgaagtcgagttttcccatgagtactggatgagacacgcattgactctcgcaaagagggctcgagatgaacgcgaggtgcccgtgggggcagtactcgtgctcaacaatcgcgtaatcggcgaaggttggaatagggcaatcggactccacgaccccactgcacatgcggaaatcatggcccttcgacagggagggcttgtgatgcagaattatcgactttatgatgcgacgctgtacaccacgtttgaaccttgcgtaatgtgcgcgggagctatgattcactcccgcattggacgagttgtattcggtgttcgcaacgccaagacgggtgccgcaggttcactgatggacgtgctgcatcatccaggcatgaaccaccgggtagaaatcacagaaggcatattggcggacgaatgtgcggcgctgttgtgtgacttttatcgcatgcccaggcgtgtctttaacgcccagaaaaaagcacaatcctctataaactccggcggaagcagcggaggatcttctggaagcgaaaccccaggcaccagcgagtctgccacaccagaatcatctggcggtagctccggcggcagcgacaagaagtattctatcggactggccatcggcaccaactctgttggatgggccgtgatcaccgacgagtacaaggtgcccagcaagaaattcaaggtgctgggcaacaccgacaggcacagcatcaagaagaacctgatcggcgcactgctgttcgactctggcgaaacagccgaggccaccagactgaagagaacagcccgcagacggtacaccagaagaaagaaccggatctgctacctccaagagatcttcagcaacgagatggccaaggtggacgacagcttcttccacagactggaagagtccttcctggtggaagaggacaagaagcacgagagacaccccatcttcggcaacatcgtggacgaggtggcctaccacgagaagtaccccaccatctaccacctgagaaagaaactggtggacagcaccgacaaggccgacctgagactgatctatctggccctggctcacatgatcaagttccggggccacttcctgatcgagggcgacctgaatcctgacaacagcgacgtggacaagctgttcatccagctggtgcagacctacaaccagctgttcgaggaaaaccccatcaacgccagcggagtggatgccaaggccatcctgtctgccagactgagcaagagcagacggctggaaaatctgatcgcccagctgcctggcgagaagaagaatggcctgttcggcaacctgattgccctgagcctgggcctgacacctaacttcaagagcaacttcgacctggccgaggacgccaaactgcagctgagcaaggacacctacgacgacgacctggacaatctgctggcccagatcggcgatcagtacgccgacttgtttctggccgccaagaatctgagcgacgccatcctgctgtccgacatcctgagagtgaacaccgagatcaccaaggcacctctgagcgcctctatggtcaagagatacgacgagcaccaccaggatctgaccctgctgaaggccctcgttagacagcagctgccagagaagtacaaagagattttcttcgaccagagcaagaacggctacgccggctacattgatggcggagccagccaagaggaattctacaagttcatcaagcccatcctcgagaagatggacggcaccgaggaactgctggtcaagctgaacagagaggacctgctgagaaagcagagaaccttcgacaacggcatcatccctcaccagatccacctgggagaactgcacgccattctgcggagacaaggggacttttacccattcctgaaggacaaccgggaaaagatcgagaaaatcctgaccttcaggatcccctactacgtgggaccactggccagaggcaatagcagattcgcctggatgaccagaaagagcgaggaaaccatcactccctggaacttcgaggaagtggtggacaagggcgccagcgctcagtccttcatcgagcggatgaccaacttcgataagaacctgcctaacgagaaggtgctgcccaagcacagcctgctgtacgagtacttcaccgtgtacaacgagctgaccaaagtgaaatacgtgaccgagggaatgagaaagcccgcctttctgagcggcgagcagaaaaaggccatcgtggatctgctgttcaagaccaaccggaaagtgaccgtgaagcagctgaaagaggactacttcaagaaaatcgagtgcttcgacagcgtcgagatctccggcgtggaagatcggttcaatgccagcctgggcacataccacgatctgctgaaaattatcaaggacaaggacttcctggacaacgaagagaacgaggacatccttgaggacatcgtgctgacactgaccctgtttgaggacagagagatgatcgaggaacggctgaaaacatacgcccacctgttcgacgacaaagtgatgaagcaactgaagcggctgagatacaccggctggggcagactgtctcggaagctgatcaacggcatccgggataagcagtccggcaagaccatcctggactttctgaagtccgacggcttcgccaacagaaacttcatgcagctgattcacgacgacagcctcaccttcaaagaggatatccagaaagcccaggtgtccggccagggcgattctctgcatgagcacattgccaacctggccggctctcccgccattaagaaaggcatcctgcagacagtgaaggtggtggacgagcttgtgaaagtgatgggcggacacaagcccgagaacatcgtgatcgaaatggccagagagaaccagaccacacagaagggacagaagaacagccgcgagagaatgaagcggatcgaagagggcatcaaagagctgggcagccagatcctgaaagaacaccccgtggaaaacacccagctgcagaacgagaagctgtacctgtactacctgcagaatggacgggatatgtacgtggaccaagagctggacatcaacagactgtccgactacgatgtggaccatatcgtgccccagtcttttctgaaggacgactccatcgacaacaaggtcctgaccagatccgacaagaatcggggcaagagcgacaacgtgccctccgaagaggtggtcaagaagatgaagaactactggcgacagctgctgaacgccaagctgattacccagcggaagttcgacaatctgaccaaggccgaaagaggcggcctgagcgaactggataaggccggcttcatcaagagacagctggtggaaacccggcagatcacaaagcacgtggcacagattctggactctcggatgaacactaagtacgacgagaacgacaaactgatccgcgaagtgaaagtcatcaccctgaagtccaagctggtgtccgatttccggaaggatttccagttctacaaagtgcgcgagatcaacaactaccatcacgcccacgacgcctacctgaatgccgttgttggaacagccctgatcaaaaagtaccctaagctggaaagcgagttcgtgtacggcgactacaaggtgtacgacgtgcggaagatgatcgccaagagcgagcaagagattggcaaggcaaccgccaagtacttcttctacagcaacatcatgaactttttcaagacagagatcaccctcgccaacggcgagatcagaaagcggcctctgatcgagacaaacggcgaaaccggcgagattgtgtgggataagggcagagactttgccacagtgcggaaagtgctgagcatgccccaagtgaatatcgtgaagaaaaccgaggtgcagacaggcggcttcagcaaagagtctatcctgcctaaggggaactccgacaagctgatcgccagaaagaaggactgggaccccaagaaatacggcggctttaactctcccaccgtggcctattctgttctggtggtggccaaagtggaaaagggcaagtccaagaaactcaagagcgtgaaagagctgctggggatcaccatcatggaaagaagcagcttcgagaagaatccgatcgatttcctcgaggccaagggttacaaagaagtgaaaaaggacctgatcatcaagctccccaagtactccctgttcgagctggaaaacggccggaagagaatgctggcctctgccggtgtcctgcagaagggaaacgaactggccctgcctagcaaatatgtgaacttcctgtacctggccagccactatgagaagctgaagggcagccccgaggacaatgagcaaaagcagctgtttgtggaacagcacaagcactacctggacgagatcatcgagcagatcagcgagtttagcaagagagtgattctggccgacgccaatctggacaaagtgctgtccgcctacaacaagcaccgggacaagcctatcagagagcaggccgagaatatcatccacctgtttaccctgaccaacctgggagcccctgcggccttcaagtactttgacaccaccatcaacaggaagcagtacaacaccaccaaagaggtgctggacgccactctgatccgccagtctatcaccggcctgtacgagacacggatcgacctgtctcaactcggaggcgacgaaggcgccgataagagaaccgccgatggctctgagttcgagagccctaagaaaaagcgcaaagtgtag

SEQ ID NO: 944 - protein, 15 aa, synthetic construct
ARHGRGYXYXGAFDI

SEQ ID NO: 945 - protein, 8 aa, synthetic construct
QQXSYPLT

SEQ ID NO: 946 - protein, 8 aa, synthetic construct
QQXSHPLT

SEQ ID NO: 947 - protein, 8 aa, synthetic construct
QQXSSPLT

SEQ ID NO: 948 - protein, 16 aa, synthetic construct
ARHGRGYDGYEGAFDI

SEQ ID NO: 949 - protein, 16 aa, synthetic construct
ARHGRGYNAYEGAFDI

SEQ ID NO: 950 - protein, 16 aa, synthetic construct
ARHGRGYNGYDGAFDI

SEQ ID NO: 951 - protein, 9 aa, synthetic construct
QQTNSYPLT

SEQ ID NO: 952 - protein, 9 aa, synthetic construct
QQVNSYPLT

SEQ ID NO: 953 - protein, 9 aa, synthetic construct
QQFRSYPLT

SEQ ID NO: 954 - protein, 9 aa, synthetic construct
QQFYSYPLT

SEQ ID NO: 955 - protein, 9 aa, synthetic construct
QQFNSHPLT

SEQ ID NO: 956 - protein, 9 aa, synthetic construct
QQFNSSPLT

SEQ ID NO: 957 - protein, 9 aa, synthetic construct
QQFNGYPLT

SEQ ID NO: 958 - protein, 9 aa, synthetic construct
IYPGDSDTR

SEQ ID NO: 959 - protein, 123 aa, synthetic construct
QVQLVQSGAAVKKPGESLKISCKGSGYRFTSYWIGWVRQMPGKGLEWMGIIYPGDSDTRYSPSFQGQVTISAGKSISTAYLQWSSLKASDTAMYYCARHGRGYNGYEGAFDIWGQGTMVTVSS

SEQ ID NO: 960 - protein, 110 aa, synthetic construct
AIQLTQSPSSLSASVGDRVTITCRASQGISSALAWYQQKPGKAPKLLIYDASSLESGVPSRFSGSGSGTDFTLTISSLQPEDFATYYCQQFNSYPLTFGGGTKVEIKRTV

SEQ ID NO: 961 - protein, 123 aa, synthetic construct
QVQLVQSGAAVKKPGESLKISCKGSGYRFTSYWIGWVRQMPGKGLEWMGIIYPGDSDTKYSPSFQGQVTISAGKSISTAYLQWSSLKASDTAMYYCARHGRGYNGYEGAFDIWGQGTMVTVSS

SEQ ID NO: 962 - protein, 123 aa, synthetic construct
QVQLVQSGAAVKKPGESLKISCKGSGYRFTSYWIGWVRQMPGKGLEWMGIIYPGDSDTRYSPSFQGQVTISAGKSISTAYLQWSSLKASDTAMYYCARHGRGYDGYEGAFDIWGQGTMVTVSS

SEQ ID NO: 963 - protein, 123 aa, synthetic construct
QVQLVQSGAAVKKPGESLKISCKGSGYRFTSYWIGWVRQMPGKGLEWMGIIYPGDSDTRYSPSFQGQVTISAGKSISTAYLQWSSLKASDTAMYYCARHGRGYNAYEGAFDIWGQGTMVTVSS

SEQ ID NO: 964 - protein, 123 aa, synthetic construct
QVQLVQSGAAVKKPGESLKISCKGSGYRFTSYWIGWVRQMPGKGLEWMGIIYPGDSDTRYSPSFQGQVTISAGKSISTAYLQWSSLKASDTAMYYCARHGRGYNGYDGAFDIWGQGTMVTVSS

SEQ ID NO: 965 - protein, 107 aa, synthetic construct
AIQLTQSPSSLSASVGDRVTITCRASQGISSALAWYQQKPGKAPKLLIYDASSLESGVPSRFSGSGSGTDFTLTISSLQPEDFATYYCQQTNSYPLTFGGGTKVEIK

SEQ ID NO: 966 - protein, 107 aa, synthetic construct
AIQLTQSPSSLSASVGDRVTITCRASQGISSALAWYQQKPGKAPKLLIYDASSLESGVPSRFSGSGSGTDFTLTISSLQPEDFATYYCQQVNSYPLTFGGGTKVEIK

SEQ ID NO: 967 - protein, 107 aa, synthetic construct
AIQLTQSPSSLSASVGDRVTITCRASQGISSALAWYQQKPGKAPKLLIYDASSLESGVPSRFSGSGSGTDFTLTISSLQPEDFATYYCQQFRSYPLTFGGGTKVEIK

SEQ ID NO: 968 - protein, 107 aa, synthetic construct
AIQLTQSPSSLSASVGDRVTITCRASQGISSALAWYQQKPGKAPKLLIYDASSLESGVPSRFSGSGSGTDFTLTISSLQPEDFATYYCQQFYSYPLTFGGGTKVEIK

SEQ ID NO: 969 - protein, 107 aa, synthetic construct
AIQLTQSPSSLSASVGDRVTITCRASQGISSALAWYQQKPGKAPKLLIYDASSLESGVPSRFSGSGSGTDFTLTISSLQPEDFATYYCQQFNGYPLTFGGGTKVEIK

SEQ ID NO: 970 - protein, 107 aa, synthetic construct
AIQLTQSPSSLSASVGDRVTITCRASQGISSALAWYQQKPGKAPKLLIYDASSLESGVPSRFSGSGSGTDFTLTISSLQPEDFATYYCQQFNSHPLTFGGGTKVEIK

SEQ ID NO: 971 - protein, 107 aa, synthetic construct
AIQLTQSPSSLSASVGDRVTITCRASQGISSALAWYQQKPGKAPKLLIYDASSLESGVPSRFSGSGSGTDFTLTISSLQPEDFATYYCQQFNSSPLTFGGGTKVEIK

SEQ ID NO: 972 - protein, 9 aa, synthetic construct
IYPGDSDTK

SEQ ID NO: 973 - protein, 37 aa, synthetic construct
YSPSFQGQVTISAGKSISTAYLQWSSLKASDTAMYYC

SEQ ID NO: 974 - DNA, 303 bp, synthetic construct
  source 1..303: mol_type = other DNA
tgcctgagctacgataccgagatcctgaccgtggaatacggcttcctgcctatcggcaagatcgtcgaggaacggatcgagtgcacagtgtacaccgtggataagaatggcttcgtgtacacccagcctatcgctcagtggcacaacagaggcgagcaagaggtgttcgagtactgcctggaagatggcagcatcatccgggccaccaaggaccacaagtttatgaccaccgacggccagatgctgcccatcgacgagatctttgagagaggcctggacctgaaacaggtggacggactgcct

SEQ ID NO: 975 - protein, 101 aa, synthetic construct; identical to SEQ ID NO: 375

SEQ ID NO: 976 - DNA, 264 bp, synthetic construct
  source 1..264: mol_type = other DNA
tgtctggacctcaagacccaagtgcagacacctcagggcatgaaagagattagcaatatccaggtgggcgacctggtcctgagcaacaccggctacaacgaggtgctgaacgtgttccctaagtccaagaagaaatcttataagatcaccctggaagatggcaaggaaatcatctgcagcgaggaacacctgttccccacccagaccggcgagatgaacatcagcggcggactgaaggagggcatgtgcctgtacgtgaaggag

SEQ ID NO: 977 - protein, 88 aa, synthetic construct
CLDLKTQVQTPQGMKEISNIQVGDLVLSNTGYNEVLNVFPKSKKKSYKITLEDGKEIICSEEHLFPTQTGEMNISGGLKEGMCLYVKE

SEQ ID NO: 978 - DNA, 267 bp, synthetic construct
  source 1..267: mol_type = other DNA
tgcctgagcctggacaccatggtggtgacaaacggcaaggccatcgagatcagagatgtgaaggtgggagattggctggaaagcgaatgtggcccagtgcaggttacagaggtgctgcctatcatcaagcagcctgtctttgagattgtgctgaaaagcggaaaaaagatccgggtgtccgctaatcacaagttccccaccaaggacggcctcaagaccatcaacagcggcctgaaggtgggcgacttcctgagaagcagagccaag

SEQ ID NO: 979 - protein, 89 aa, synthetic construct
CLSLDTMVVTNGKAIEIRDVKVGDWLESECGPVQVTEVLPIIKQPVFEIVLKSGKKIRVSANHKFPTKDGLKTINSGLKVGDFLRSRAK

SEQ ID NO: 980 - DNA, 303 bp, synthetic construct
  source 1..303: mol_type = other DNA
tgttttgtgcctggcaccctggtgaacacagagaatggcctgaagaaaatcgaggaaatcaaggtgggcgacaaggtgttcagccatacaggcaagctgcaggaggtggtggacaccctgatcttcgaccgggacgaggaaatcatctctatcaacggcattgattgcaccaagaaccacgagttctacgtgatcgataaggaaaacgctaatagagtgaacgaggacaacatccacctcttcgccagatgggtccacgccgaggaactggatatgaaaaagcacctgctgatcgagctggaa

SEQ ID NO: 981 - protein, 101 aa, synthetic construct
CFVPGTLVNTENGLKKIEEIKVGDKVFSHTGKLQEVVDTLIFDRDEEIISINGIDCTKNHEFYVIDKENANRVNEDNIHLFARWVHAEELDMKKHLLIELE

SEQ ID NO: 982 - DNA, 315 bp, synthetic construct
  source 1..315: mol_type = other DNA
tgcctggtgggctctagcgagattatcacaagaaactacggcaagaccaccatcaaggaagtggtcgagatcttcgacaacgacaagaatatccaggtgctggccttcaacacccacaccgataatatcgagtgggcccctatcaaggccgctcagctgaccagacctaacgccgagctggttgaactggaaatcgacaccctgcacggcgtgaaaacaatccggtgcacccctgaccaccccgtgtacaccaagaacagaggctacgtgcgggccgacgagctgacagatgatgacgagctcgtggtggctatc

SEQ ID NO: 983 - protein, 105 aa, synthetic construct
CLVGSSEIITRNYGKTTIKEVVEIFDNDKNIQVLAFNTHTDNIEWAPIKAAQLTRPNAELVELEIDTLHGVKTIRCTPDHPVYTKNRGYVRADELTDDDELVVAI

SEQ ID NO: 984 - DNA, 306 bp, synthetic construct
  source 1..306: mol_type = other DNA
tgcctgagctacgagacagagatcctgaccgtggaatatggcctgctgccaatcggaaagatcgtggaaaagcggatcgagtgcaccgtctacagcgtggacaacaacggaaatatctatacacagcctgtggcccaatggcacgaccggggcgaacaggaggtgtttgagtactgcctggaagatggttctctgattagagccaccaaggaccacaagttcatgaccgtcgacggccagatgctgcccatcgacgaaatcttcgagcgggaactcgacctgatgagagtggataacctgcccaat

SEQ ID NO: 985 - protein, 102 aa, synthetic construct; identical to SEQ ID NO: 371

SEQ ID NO: 986 - protein, 101 aa, synthetic construct; identical to SEQ ID NO: 375

SEQ ID NO: 987 - protein, 102 aa, synthetic construct; identical to SEQ ID NO: 371

SEQ ID NO: 988 - DNA, 279 bp, synthetic construct
  source 1..279: mol_type = other DNA
acaagaagcggatactgtctggacctcaagacccaagtgcagacacctcagggcatgaaagagattagcaatatccaggtgggcgacctggtcctgagcaacaccggctacaacgaggtgctgaacgtgttccctaagtccaagaagaaatcttataagatcaccctggaagatggcaaggaaatcatctgcagcgaggaacacctgttccccacccagaccggcgagatgaacatcagcggcggactgaaggagggcatgtgcctgtacgtgaaggag

SEQ ID NO: 989 - protein, 93 aa, synthetic construct
TRSGYCLDLKTQVQTPQGMKEISNIQVGDLVLSNTGYNEVLNVFPKSKKKSYKITLEDGKEIICSEEHLFPTQTGEMNISGGLKEGMCLYVKE

SEQ ID NO: 990 - DNA, 282 bp, synthetic construct
  source 1..282: mol_type = other DNA
tctcagctgaaccggtgcctgagcctggacaccatggtggtgacaaacggcaaggccatcgagatcagagatgtgaaggtgggagattggctggaaagcgaatgtggcccagtgcaggttacagaggtgctgcctatcatcaagcagcctgtctttgagattgtgctgaaaagcggaaaaaagatccgggtgtccgctaatcacaagttccccaccaaggacggcctcaagaccatcaacagcggcctgaaggtgggcgacttcctgagaagcagagccaag

SEQ ID NO: 991 - protein, 94 aa, synthetic construct
SQLNRCLSLDTMVVTNGKAIEIRDVKVGDWLESECGPVQVTEVLPIIKQPVFEIVLKSGKKIRVSANHKFPTKDGLKTINSGLKVGDFLRSRAK

SEQ ID NO: 992 - DNA, 318 bp, synthetic construct
  source 1..318: mol_type = other DNA
ggcatcggcggaggatgttttgtgcctggcaccctggtgaacacagagaatggcctgaagaaaatcgaggaaatcaaggtgggcgacaaggtgttcagccatacaggcaagctgcaggaggtggtggacaccctgatcttcgaccgggacgaggaaatcatctctatcaacggcattgattgcaccaagaaccacgagttctacgtgatcgataaggaaaacgctaatagagtgaacgaggacaacatccacctcttcgccagatgggtccacgccgaggaactggatatgaaaaagcacctgctgatcgagctggaa

SEQ ID NO: 993 - protein, 106 aa, synthetic construct
GIGGGCFVPGTLVNTENGLKKIEEIKVGDKVFSHTGKLQEVVDTLIFDRDEEIISINGIDCTKNHEFYVIDKENANRVNEDNIHLFARWVHAEELDMKKHLLIELE

SEQ ID NO: 994 - DNA, 330 bp, synthetic construct
  source 1..330: mol_type = other DNA
ggaacaaacccatgttgcctggtgggctctagcgagattatcacaagaaactacggcaagaccaccatcaaggaagtggtcgagatcttcgacaacgacaagaatatccaggtgctggccttcaacacccacaccgataatatcgagtgggcccctatcaaggccgctcagctgaccagacctaacgccgagctggttgaactggaaatcgacaccctgcacggcgtgaaaacaatccggtgcacccctgaccaccccgtgtacaccaagaacagaggctacgtgcgggccgacgagctgacagatgatgacgagctcgtggtggctatc

SEQ ID NO: 995 - protein, 110 aa, synthetic construct
GTNPCCLVGSSEIITRNYGKTTIKEVVEIFDNDKNIQVLAFNTHTDNIEWAPIKAAQLTRPNAELVELEIDTLHGVKTIRCTPDHPVYTKNRGYVRADELTDDDELVVAI

SEQ ID NO: 996 - DNA, 105 bp, synthetic construct
  source 1..105: mol_type = other DNA
gtcaagatcatcagcagaaagagcctgggcacccagaacgtgtacgatatcggagtgggcgagccccacaactttctgctcaagaatggcctggtggccagcaac

SEQ ID NO: 997 - protein, 35 aa, synthetic construct
VKIISRKSLGTQNVYDIGVGEPHNFLLKNGLVASN

SEQ ID NO: 998 - DNA, 114 bp, synthetic construct
  source 1..114: mol_type = other DNA
atgatgctgaaaaagatcctgaagatcgaggaactggatgagagagagctgatcgacatcgaagtgtctggcaatcacctgttctacgccaacgacatcctgacccacaacagc

SEQ ID NO: 999 - protein, 38 aa, synthetic construct
MMLKKILKIEELDERELIDIEVSGNHLFYANDILTHNS

SEQ ID NO: 1000 - DNA, 138 bp, synthetic construct
  source 1..138: mol_type = other DNA
atgtgcgaaatcttcgagaacgagattgattgggacgaaatcgcctctatcgagtacgtgggcgtggaagagacaatcgacatcaacgtgaccaacgacagactgtttttcgccaatggcatcctgacccacaacagc

SEQ ID NO: 1001 - protein, 46 aa, synthetic construct
MCEIFENEIDWDEIASIEYVGVEETIDINVTNDRLFFANGILTHNS

SEQ ID NO: 1002 - DNA, 123 bp, synthetic construct
  source 1..123: mol_type = other DNA
atgaaattcaagctgaaggaaatcaccagcatcgagacaaagcactacaagggcaaggtgcacgatctgaccgtgaaccaggaccacagctacaacgtcagaggcaccgtggtgcataattct

SEQ ID NO: 1003 - protein, 41 aa, synthetic construct
MKFKLKEITSIETKHYKGKVHDLTVNQDHSYNVRGTVVHNS

SEQ ID NO: 1004 - DNA, 123 bp, synthetic construct
  source 1..123: mol_type = other DNA
atggaagccaagacctacatcggcaagctgaaatctagaaagatcgtgtccaacgaggatacatacgacatccagaccagcacccacaatttcttcgccaacgacatcctggtgcacaacagc

SEQ ID NO: 1005 - protein, 41 aa, synthetic construct
MEAKTYIGKLKSRKIVSNEDTYDIQTSTHNFFANDILVHNS

SEQ ID NO: 1006 - DNA, 108 bp, synthetic construct
  source 1..108: mol_type = other DNA
atgatcaagatcgccacaagaaagtacctgggcaagcagaacgtgtacgacatcggcgtggagagagaccacaacttcgccctgaagaacggctttatcgcctctaat

SEQ ID NO: 1007 - protein, 36 aa, synthetic construct; identical to SEQ ID NO: 373

SEQ ID NO: 1008 - protein, 36 aa, synthetic construct
MVKIISRKSLGTQNVYDIGVGEPHNFLLKNGLVASN

SEQ ID NO: 1009 - protein, 35 aa, synthetic construct
IKIATRKYLGKQNVYDIGVERDHNFALKNGFIASN

SEQ ID NO: 1010 - protein, 88 aa, synthetic construct
GTTTTAGTACTCTGTAATGAAAATTACAGAATCTACTAAAACAAGGCAAAATGCCGTGTTTATCTCGTCAACTTGTTGGCGAGATTTT

SEQ ID NO: 1011 - protein, 452 aa, synthetic construct
QVQLVQSGAAVKKPGESLKISCKGSGYRFTSYWIGWVRQMPGKGLEWMGIIYPGDSDTRYSPSFQGQVTISAGKSISTAYLQWSSLKASDTAMYYCARHGRGYDGYDGAFDIWGQGTMVTVSSASTKGPSVFPLAPSSKSTSGGTAALGCLVKDYFPEPVTVSWNSGALTSGVHTFPAVLQSSGLYSLSSVVTVPSSSLGTQTYICNVNHKPSNTKVDKKVEPKSCDKTHTCPPCPAPELLGGPSVFLFPPKPKDTLMISRTPEVTCVVVDVSHEDPEVKFNWYVDGVEVHNAKTKPREEQYNSTYRVVSVLTVLHQDWLNGKEYKCKVSNKALPAPIEKTISKAKGQPREPQVYTLPPSRDELTKNQVSLTCLVKGFYPSDIAVEWESNGQPENNYKTTPPVLDSDGSFFLYSKLTVDKSRWQQGNVFSCSVMHEALHNHYTQKSLSLSPG

SEQ ID NO: 1012 - protein, 16 aa, synthetic construct
ARHGRGYDGYDGAFDI

SEQ ID NO: 1013 - protein, 452 aa, synthetic construct
QVQLVQSGAAVKKPGESLKISCKGSGYRFTSYWIGWVRQMPGKGLEWMGIIYPGDSDTRYSPSFQGQVTISAGKSISTAYLQWSSLKASDTAMYYCARHGRGYDGYEGAFDIWGQGTMVTVSSASTKGPSVFPLAPSSKSTSGGTAALGCLVKDYFPEPVTVSWNSGALTSGVHTFPAVLQSSGLYSLSSVVTVPSSSLGTQTYICNVNHKPSNTKVDKKVEPKSCDKTHTCPPCPAPELLGGPSVFLFPPKPKDTLMISRTPEVTCVVVDVSHEDPEVKFNWYVDGVEVHNAKTKPREEQYNSTYRVVSVLTVLHQDWLNGKEYKCKVSNKALPAPIEKTISKAKGQPREPQVYTLPPSRDELTKNQVSLTCLVKGFYPSDIAVEWESNGQPENNYKTTPPVLDSDGSFFLYSKLTVDKSRWQQGNVFSCSVMHEALHNHYTQKSLSLSPG

SEQ ID NO: 1014 - protein, 214 aa, synthetic construct
AIQLTQSPSSLSASVGDRVTITCRASQGISSALAWYQQKPGKAPKLLIYDASSLESGVPSRFSGSGSGTDFTLTISSLQPEDFATYYCQQLNGYPLTFGGGTKVEIKRTVAAPSVFIFPPSDEQLKSGTASVVCLLNNFYPREAKVQWKVDNALQSGNSQESVTEQDSKDSTYSLSSTLTLSKADYEKHKVYACEVTHQGLSSPVTKSFNRGEC

SEQ ID NO: 1015 - protein, 9 aa, synthetic construct
QQLNGYPLT

SEQ ID NO: 1016 - protein, 452 aa, synthetic construct
QVQLVQSGAAVKKPGESLKISCKGSGYRFTSYWIGWVRQMPGKGLEWMGIIYPGDSDTKYSPSFQGQVTISAGKSISTAYLQWSSLKASDTAMYYCARHGRGYDGYEGAFDIWGQGTMVTVSSASTKGPSVFPLAPSSKSTSGGTAALGCLVKDYFPEPVTVSWNSGALTSGVHTFPAVLQSSGLYSLSSVVTVPSSSLGTQTYICNVNHKPSNTKVDKKVEPKSCDKTHTCPPCPAPELLGGPSVFLFPPKPKDTLMISRTPEVTCVVVDVSHEDPEVKFNWYVDGVEVHNAKTKPREEQYNSTYRVVSVLTVLHQDWLNGKEYKCKVSNKALPAPIEKTISKAKGQPREPQVYTLPPSRDELTKNQVSLTCLVKGFYPSDIAVEWESNGQPENNYKTTPPVLDSDGSFFLYSKLTVDKSRWQQGNVFSCSVMHEALHNHYTQKSLSLSPG

SEQ ID NO: 1017 - protein, 214 aa, synthetic construct
AIQLTQSPSSLSASVGDRVTITCRASQGISSALAWYQQKPGKAPKLLIYDASSLESGVPSRFSGSGSGTDFTLTISSLQPEDFATYYCQQFYSYPLTFGGGTKVEIKRTVAAPSVFIFPPSDEQLKSGTASVVCLLNNFYPREAKVQWKVDNALQSGNSQESVTEQDSKDSTYSLSSTLTLSKADYEKHKVYACEVTHQGLSSPVTKSFNRGEC

SEQ ID NO: 1018 - protein, 214 aa, synthetic construct
AIQLTQSPSSLSASVGDRVTITCRASQGISSALAWYQQKPGKAPKLLIYDASSLESGVPSRFSGSGSGTDFTLTISSLQPEDFATYYCQQFNSHPLTFGGGTKVEIKRTVAAPSVFIFPPSDEQLKSGTASVVCLLNNFYPREAKVQWKVDNALQSGNSQESVTEQDSKDSTYSLSSTLTLSKADYEKHKVYACEVTHQGLSSPVTKSFNRGEC

SEQ ID NO: 1019 - protein, 214 aa, synthetic construct
AIQLTQSPSSLSASVGDRVTITCRASQGISSALAWYQQKPGKAPKLLIYDASSLESGVPSRFSGSGSGTDFTLTISSLQPEDFATYYCQQFSSYPLTFGGGTKVEIKRTVAAPSVFIFPPSDEQLKSGTASVVCLLNNFYPREAKVQWKVDNALQSGNSQESVTEQDSKDSTYSLSSTLTLSKADYEKHKVYACEVTHQGLSSPVTKSFNRGEC

SEQ ID NO: 1020 - protein, 9 aa, synthetic construct
QQFSSYPLT

SEQ ID NO: 1021 - protein, 452 aa, synthetic construct
QVQLVQSGAAVKKPGESLKISCKGSGYRFTSYWIGWVRQMPGKGLEWMGIIYPGDSDTKYSPSFQGQVTISAGKSISTAYLQWSSLKASDTAMYYCARHGRGYDGYDGAFDIWGQGTMVTVSSASTKGPSVFPLAPSSKSTSGGTAALGCLVKDYFPEPVTVSWNSGALTSGVHTFPAVLQSSGLYSLSSVVTVPSSSLGTQTYICNVNHKPSNTKVDKKVEPKSCDKTHTCPPCPAPELLGGPSVFLFPPKPKDTLMISRTPEVTCVVVDVSHEDPEVKFNWYVDGVEVHNAKTKPREEQYNSTYRVVSVLTVLHQDWLNGKEYKCKVSNKALPAPIEKTISKAKGQPREPQVYTLPPSRDELTKNQVSLTCLVKGFYPSDIAVEWESNGQPENNYKTTPPVLDSDGSFFLYSKLTVDKSRWQQGNVFSCSVMHEALHNHYTQKSLSLSPG

SEQ ID NO: 1022 - protein, 214 aa, synthetic construct
AIQLTQSPSSLSASVGDRVTITCRASQGISSALAWYQQKPGKAPKLLIYDASSLESGVPSRFSGSGSGTDFTLTISSLQPEDFATYYCQQTNSHPLTFGGGTKVEIKRTVAAPSVFIFPPSDEQLKSGTASVVCLLNNFYPREAKVQWKVDNALQSGNSQESVTEQDSKDSTYSLSSTLTLSKADYEKHKVYACEVTHQGLSSPVTKSFNRGEC

SEQ ID NO: 1023 - protein, 9 aa, synthetic construct
QQTNSHPLT

SEQ ID NO: 1024 - protein, 214 aa, synthetic construct
AIQLTQSPSSLSASVGDRVTITCRASQGISSALAWYQQKPGKAPKLLIYDASSLESGVPSRFSGSGSGTDFTLTISSLQPEDFATYYCQQVRSYPLTFGGGTKVEIKRTVAAPSVFIFPPSDEQLKSGTASVVCLLNNFYPREAKVQWKVDNALQSGNSQESVTEQDSKDSTYSLSSTLTLSKADYEKHKVYACEVTHQGLSSPVTKSFNRGEC

SEQ ID NO: 1025 - protein, 9 aa, synthetic construct
QQVRSYPLT

SEQ ID NO: 1026 - protein, 452 aa, synthetic construct
QVQLVQSGAAVKKPGESLKISCKGSGYRFTSYWIGWVRQMPGKGLEWMGIIYPGDSDTRYSPSFQGQVTISAGKSISTAYLQWSSLKASDTAMYYCARHGRGYDAYEGAFDIWGQGTMVTVSSASTKGPSVFPLAPSSKSTSGGTAALGCLVKDYFPEPVTVSWNSGALTSGVHTFPAVLQSSGLYSLSSVVTVPSSSLGTQTYICNVNHKPSNTKVDKKVEPKSCDKTHTCPPCPAPELLGGPSVFLFPPKPKDTLMISRTPEVTCVVVDVSHEDPEVKFNWYVDGVEVHNAKTKPREEQYNSTYRVVSVLTVLHQDWLNGKEYKCKVSNKALPAPIEKTISKAKGQPREPQVYTLPPSRDELTKNQVSLTCLVKGFYPSDIAVEWESNGQPENNYKTTPPVLDSDGSFFLYSKLTVDKSRWQQGNVFSCSVMHEALHNHYTQKSLSLSPG

SEQ ID NO: 1027 - protein, 16 aa, synthetic construct
ARHGRGYDAYEGAFDI

SEQ ID NO: 1028 - protein, 214 aa, synthetic construct
AIQLTQSPSSLSASVGDRVTITCRASQGISSALAWYQQKPGKAPKLLIYDASSLESGVPSRFSGSGSGTDFTLTISSLQPEDFATYYCQQTYSYPLTFGGGTKVEIKRTVAAPSVFIFPPSDEQLKSGTASVVCLLNNFYPREAKVQWKVDNALQSGNSQESVTEQDSKDSTYSLSSTLTLSKADYEKHKVYACEVTHQGLSSPVTKSFNRGEC

SEQ ID NO: 1029 - protein, 9 aa, synthetic construct
QQTYSYPLT

SEQ ID NO: 1030 - protein, 452 aa, synthetic construct
QVQLVQSGAAVKKPGESLKISCKGSGYRFTSYWIGWVRQMPGKGLEWMGIIYPGDSDTKYSPSFQGQVTISAGKSISTAYLQWSSLKASDTAMYYCARHGRGYDAYDGAFDIWGQGTMVTVSSASTKGPSVFPLAPSSKSTSGGTAALGCLVKDYFPEPVTVSWNSGALTSGVHTFPAVLQSSGLYSLSSVVTVPSSSLGTQTYICNVNHKPSNTKVDKKVEPKSCDKTHTCPPCPAPELLGGPSVFLFPPKPKDTLMISRTPEVTCVVVDVSHEDPEVKFNWYVDGVEVHNAKTKPREEQYNSTYRVVSVLTVLHQDWLNGKEYKCKVSNKALPAPIEKTISKAKGQPREPQVYTLPPSRDELTKNQVSLTCLVKGFYPSDIAVEWESNGQPENNYKTTPPVLDSDGSFFLYSKLTVDKSRWQQGNVFSCSVMHEALHNHYTQKSLSLSPG

SEQ ID NO: 1031 - protein, 214 aa, synthetic construct
AIQLTQSPSSLSASVGDRVTITCRASQGISSALAWYQQKPGKAPKLLIYDASSLESGVPSRFSGSGSGTDFTLTISSLQPEDFATYYCQQTNSYPLTFGGGTKVEIKRTVAAPSVFIFPPSDEQLKSGTASVVCLLNNFYPREAKVQWKVDNALQSGNSQESVTEQDSKDSTYSLSSTLTLSKADYEKHKVYACEVTHQGLSSPVTKSFNRGEC

SEQ ID NO: 1032 - protein, 16 aa, synthetic construct
ARHGRGYDAYDGAFDI

SEQ ID NO: 1033 - protein, 9 aa, synthetic construct
QQFNSTPLT

SEQ ID NO: 1034 - protein, 452 aa, synthetic construct
QVQLVQSGAAVKKPGESLKISCKGSGYRFTSYWIGWVRQMPGKGLEWMGIIYPGDSDTKYSPSFQGQVTISAGKSISTAYLQWSSLKASDTAMYYCARHGRGYDAYEGAFDIWGQGTMVTVSSASTKGPSVFPLAPSSKSTSGGTAALGCLVKDYFPEPVTVSWNSGALTSGVHTFPAVLQSSGLYSLSSVVTVPSSSLGTQTYICNVNHKPSNTKVDKKVEPKSCDKTHTCPPCPAPELLGGPSVFLFPPKPKDTLMISRTPEVTCVVVDVSHEDPEVKFNWYVDGVEVHNAKTKPREEQYNSTYRVVSVLTVLHQDWLNGKEYKCKVSNKALPAPIEKTISKAKGQPREPQVYTLPPSRDELTKNQVSLTCLVKGFYPSDIAVEWESNGQPENNYKTTPPVLDSDGSFFLYSKLTVDKSRWQQGNVFSCSVMHEALHNHYTQKSLSLSPG

SEQ ID NO: 1035 - protein, 214 aa, synthetic construct
AIQLTQSPSSLSASVGDRVTITCRASQGISSALAWYQQKPGKAPKLLIYDASSLESGVPSRFSGSGSGTDFTLTISSLQPEDFATYYCQQTRSYPLTFGGGTKVEIKRTVAAPSVFIFPPSDEQLKSGTASVVCLLNNFYPREAKVQWKVDNALQSGNSQESVTEQDSKDSTYSLSSTLTLSKADYEKHKVYACEVTHQGLSSPVTKSFNRGEC

SEQ ID NO: 1036 - protein, 9 aa, synthetic construct
QQTRSYPLT

SEQ ID NO: 1037 - protein, 214 aa, synthetic construct
AIQLTQSPSSLSASVGDRVTITCRASQGISSALAWYQQKPGKAPKLLIYDASSLESGVPSRFSGSGSGTDFTLTISSLQPEDFATYYCQQVNSHPLTFGGGTKVEIKRTVAAPSVFIFPPSDEQLKSGTASVVCLLNNFYPREAKVQWKVDNALQSGNSQESVTEQDSKDSTYSLSSTLTLSKADYEKHKVYACEVTHQGLSSPVTKSFNRGEC

SEQ ID NO: 1038 - protein, 9 aa, synthetic construct
QQVNSHPLT

SEQ ID NO: 1039 - protein, 214 aa, synthetic construct
AIQLTQSPSSLSASVGDRVTITCRASQGISSALAWYQQKPGKAPKLLIYDASSLESGVPSRFSGSGSGTDFTLTISSLQPEDFATYYCQQFRSSPLTFGGGTKVEIKRTVAAPSVFIFPPSDEQLKSGTASVVCLLNNFYPREAKVQWKVDNALQSGNSQESVTEQDSKDSTYSLSSTLTLSKADYEKHKVYACEVTHQGLSSPVTKSFNRGEC

SEQ ID NO: 1040 - protein, 9 aa, synthetic construct
QQFRSSPLT

SEQ ID NO: 1041 - protein, 214 aa, synthetic construct
AIQLTQSPSSLSASVGDRVTITCRASQGISSALAWYQQKPGKAPKLLIYDASSLESGVPSRFSGSGSGTDFTLTISSLQPEDFATYYCQQVYSYPLTFGGGTKVEIKRTVAAPSVFIFPPSDEQLKSGTASVVCLLNNFYPREAKVQWKVDNALQSGNSQESVTEQDSKDSTYSLSSTLTLSKADYEKHKVYACEVTHQGLSSPVTKSFNRGEC

SEQ ID NO: 1042 - protein, 9 aa, synthetic construct
QQVYSYPLT

SEQ ID NO: 1043 - protein, 452 aa, synthetic construct
QVQLVQSGAAVKKPGESLKISCKGSGYRFTSYWIGWVRQMPGKGLEWMGIIYPGDSDTRYSPSFQGQVTISAGKSISTAYLQWSSLKASDTAMYYCARHGRGYDAYDGAFDIWGQGTMVTVSSASTKGPSVFPLAPSSKSTSGGTAALGCLVKDYFPEPVTVSWNSGALTSGVHTFPAVLQSSGLYSLSSVVTVPSSSLGTQTYICNVNHKPSNTKVDKKVEPKSCDKTHTCPPCPAPELLGGPSVFLFPPKPKDTLMISRTPEVTCVVVDVSHEDPEVKFNWYVDGVEVHNAKTKPREEQYNSTYRVVSVLTVLHQDWLNGKEYKCKVSNKALPAPIEKTISKAKGQPREPQVYTLPPSRDELTKNQVSLTCLVKGFYPSDIAVEWESNGQPENNYKTTPPVLDSDGSFFLYSKLTVDKSRWQQGNVFSCSVMHEALHNHYTQKSLSLSPG

SEQ ID NO: 1044 - protein, 9 aa, synthetic construct
QQTNSYPLT

SEQ ID NO: 1045 - protein, 214 aa, synthetic construct
AIQLTQSPSSLSASVGDRVTITCRASQGISSALAWYQQKPGKAPKLLIYDASSLESGVPSRFSGSGSGTDFTLTISSLQPEDFATYYCQQFRSYPLTFGGGTKVEIKRTVAAPSVFIFPPSDEQLKSGTASVVCLLNNFYPREAKVQWKVDNALQSGNSQESVTEQDSKDSTYSLSSTLTLSKADYEKHKVYACEVTHQGLSSPVTKSFNRGEC

SEQ ID NO: 1046 - protein, 214 aa, synthetic construct
AIQLTQSPSSLSASVGDRVTITCRASQGISSALAWYQQKPGKAPKLLIYDASSLESGVPSRFSGSGSGTDFTLTISSLQPEDFATYYCQQVRSHPLTFGGGTKVEIKRTVAAPSVFIFPPSDEQLKSGTASVVCLLNNFYPREAKVQWKVDNALQSGNSQESVTEQDSKDSTYSLSSTLTLSKADYEKHKVYACEVTHQGLSSPVTKSFNRGEC

SEQ ID NO: 1047 - protein, 9 aa, synthetic construct
QQVRSHPLT

SEQ ID NO: 1048 - protein, 214 aa, synthetic construct
AIQLTQSPSSLSASVGDRVTITCRASQGISSALAWYQQKPGKAPKLLIYDASSLESGVPSRFSGSGSGTDFTLTISSLQPEDFATYYCQQTNSSPLTFGGGTKVEIKRTVAAPSVFIFPPSDEQLKSGTASVVCLLNNFYPREAKVQWKVDNALQSGNSQESVTEQDSKDSTYSLSSTLTLSKADYEKHKVYACEVTHQGLSSPVTKSFNRGEC

SEQ ID NO: 1049 - protein, 214 aa, synthetic construct
AIQLTQSPSSLSASVGDRVTITCRASQGISSALAWYQQKPGKAPKLLIYDASSLESGVPSRFSGSGSGTDFTLTISSLQPEDFATYYCQQVNSYPLTFGGGTKVEIKRTVAAPSVFIFPPSDEQLKSGTASVVCLLNNFYPREAKVQWKVDNALQSGNSQESVTEQDSKDSTYSLSSTLTLSKADYEKHKVYACEVTHQGLSSPVTKSFNRGEC

SEQ ID NO: 1050 - protein, 9 aa, synthetic construct
QQTNSSPLT

SEQ ID NO: 1051 - protein, 453 aa, synthetic construct
QVQLVQSGAAVKKPGESLKISCKGSGYRFTSYWIGWVRQMPGKGLEWMGIIYPGDSDTRYSPSFQGQVTISAGKSISTAYLQWSSLKASDTAMYYCARHGRGYDGYDGAFDIWGQGTMVTVSSASTKGPSVFPLAPSSKSTSGGTAALGCLVKDYFPEPVTVSWNSGALTSGVHTFPAVLQSSGLYSLSSVVTVPSSSLGTQTYICNVNHKPSNTKVDKKVEPKSCDKTHTCPPCPAPEAAGGPSVFLFPPKPKDTLMISRTPEVTCVVVAVSHEDPEVKFNWYVDGVEVHNAKTKPREEQYNSTYRVVSVLTVLHQDWLNGKEYKCKVSNKALPAPIEKTISKAKGQPREPQVYTLPPSRDELTKNQVSLTCLVKGFYPSDIAVEWESNGQPENNYKTTPPVLDSDGSFFLYSKLTVDKSRWQQGNVFSCSVMHEALHNHYTQKSLSLSPGK

SEQ ID NO: 1052 - skipped

SEQ ID NO: 1053 - protein, 9 aa, synthetic construct
IYPGDSDTR

SEQ ID NO: 1054-1058 - skipped (5 entries)

SEQ ID NO: 1059 - protein, 37 aa, synthetic construct; identical to SEQ ID NO: 973

SEQ ID NO: 1060-1062 - skipped (3 entries)

SEQ ID NO: 1063 - protein, 9 aa, synthetic construct
IYPGDSDTK

SEQ ID NO: 1064 - skipped

SEQ ID NO: 1065 - protein, 37 aa, synthetic construct
YADSVKGRFTSSRDNAKNSLYLEMNSLRAEDTALYYC

SEQ ID NO: 1066 - protein, 453 aa, synthetic construct
QVQLVQSGAAVKKPGESLKISCKGSGYRFTSYWIGWVRQMPGKGLEWMGIIYPGDSDTKYSPSFQGQVTISAGKSISTAYLQWSSLKASDTAMYYCARHGRGYDAYDGAFDIWGQGTMVTVSSASTKGPSVFPLAPSSKSTSGGTAALGCLVKDYFPEPVTVSWNSGALTSGVHTFPAVLQSSGLYSLSSVVTVPSSSLGTQTYICNVNHKPSNTKVDKKVEPKSCDKTHTCPPCPAPEAAGGPSVFLFPPKPKDTLMISRTPEVTCVVVAVSHEDPEVKFNWYVDGVEVHNAKTKPREEQYNSTYRVVSVLTVLHQDWLNGKEYKCKVSNKALPAPIEKTISKAKGQPREPQVYTLPPSRDELTKNQVSLTCLVKGFYPSDIAVEWESNGQPENNYKTTPPVLDSDGSFFLYSKLTVDKSRWQQGNVFSCSVMHEALHNHYTQKSLSLSPGK

SEQ ID NO: 1067 - protein, 453 aa, synthetic construct
QVQLVQSGAAVKKPGESLKISCKGSGYRFTSYWIGWVRQMPGKGLEWMGIIYPGDSDTRYSPSFQGQVTISAGKSISTAYLQWSSLKASDTAMYYCARHGRGYDAYDGAFDIWGQGTMVTVSSASTKGPSVFPLAPSSKSTSGGTAALGCLVKDYFPEPVTVSWNSGALTSGVHTFPAVLQSSGLYSLSSVVTVPSSSLGTQTYICNVNHKPSNTKVDKKVEPKSCDKTHTCPPCPAPEAAGGPSVFLFPPKPKDTLMISRTPEVTCVVVAVSHEDPEVKFNWYVDGVEVHNAKTKPREEQYNSTYRVVSVLTVLHQDWLNGKEYKCKVSNKALPAPIEKTISKAKGQPREPQVYTLPPSRDELTKNQVSLTCLVKGFYPSDIAVEWESNGQPENNYKTTPPVLDSDGSFFLYSKLTVDKSRWQQGNVFSCSVMHEALHNHYTQKSLSLSPGK

SEQ ID NO: 1068 - protein, 107 aa, synthetic construct
DVVMTQSPGTLSLSPGERATLSCRASQSVSSSYLAWYQQKPGQAPRLLIYGASSRATGIPDRFSGSGSGTDFTLTISRLEPEDFAVYYCQQSETCLTFGGGTKLEIK

SEQ ID NO: 1069 - skipped

SEQ ID NO: 1070 - protein, 9 aa, synthetic construct
ISWNSGTIG

SEQ ID NO: 1071-1073 - skipped (3 entries)

SEQ ID NO: 1074 - protein, 8 aa, synthetic construct
QQSETCLT

SEQ ID NO: 1075-1076 - skipped (2 entries)

SEQ ID NO: 1077 - protein, 37 aa, synthetic construct
YADSVKGRFTNSRDNAKNSLYLEMNSLRAEDTALYYC

SEQ ID NO: 1078-1079 - skipped (2 entries)

SEQ ID NO: 1080 - protein, 36 aa, synthetic construct
TRATGIPARFSGSGSGTEFALTISSLQSEDFAVYYC

SEQ ID NO: 1081 - skipped

SEQ ID NO: 1082 - protein, 10 aa, synthetic construct
FGGGTKLEIK

SEQ ID NO: 1083 - skipped

SEQ ID NO: 1084 - protein, 9 aa, synthetic construct
QQYNFWPYT

SEQ ID NO: 1085 - protein, 127 aa, synthetic construct
EVQLVESGGGLVQPGRSLRLSCAASGFTFDDYAMHWVRQAPGKGLEWVSGISWNSGTIGYADSVKGRFTSSRDNAKNSLYLEMNSLRAEDTALYYCAKDSPPGYCSSASCYGAFDIWGQGTMVTVSS

SEQ ID NO: 1086 - protein, 108 aa, synthetic construct
EIVMTQSPGTLSLSPGERATLSCRASQSVSSSYLAWYQQKPGQAPRLLIYGSSTRATGIPARFSGSGSGTEFALTISSLQSEDFAVYYCQQYNFWPYTFGQGTKVEIK

SEQ ID NO: 1087 - protein, 26 aa, synthetic construct
EIVMTQSPGTLSLSPGERATLSCRAS

SEQ ID NO: 1088 - protein, 10 aa, synthetic construct
FGQGTKVEIK

SEQ ID NO: 1089 - protein, 127 aa, synthetic construct
EVQLVESGGGLVQPGRSLRLSCAASGFTFDDYAMHWVRQAPGKGLEWVSGISWNSGTIGYADSVKGRFTNSRDNAKNSLYLEMNSLRAEDTALYYCAKDSPPGYCASASCYGAFDIWGQGTMVTVSS

SEQ ID NO: 1090 - protein, 20 aa, synthetic construct
AKDSPPGYCASASCYGAFDI

SEQ ID NO: 1091 - protein, 8 aa, synthetic construct
QQDSLGLT

SEQ ID NO: 1092 - protein, 127 aa, synthetic construct
EVQLVESGGGLVQPGRSLRLSCAASGFTFDDYAMHWVRQAPGKGLEWVSGISWNSGTIGYADSVKGRFTNSRDNAKNSLYLEMNSLRAEDTALYYCAKDWPSGFCSSAYCYGAFDIWGQGTMVTVSS

SEQ ID NO: 1093 - protein, 107 aa, synthetic construct
DIVMTQSPSFLSASVGDRVTITCRASQGISSYLAWYQQKPGKAPKLLIYAASTLQNGVPSRFSGSGSGTDFTLTITSLQPEDFATYYCQQSYSTPYTFGQGTKLEIK

SEQ ID NO: 1094 - protein, 20 aa, synthetic construct
AKDWPSGFCSSAYCYGAFDI

SEQ ID NO: 1095-1096 - skipped (2 entries)

SEQ ID NO: 1097 - protein, 9 aa, synthetic construct
QQSYSTPYT

SEQ ID NO: 1098 - skipped

SEQ ID NO: 1099 - protein, 36 aa, synthetic construct
TLQNGVPSRFSGSGSGTDFTLTITSLQPEDFATYYC

SEQ ID NO: 1100 - protein, 10 aa, synthetic construct
FGQGTKLEIK

SEQ ID NO: 1101 - protein, 127 aa, synthetic construct
EVQLVESGGGLVQPGRSLRLSCAASGFTFDDYAMHWVRQAPGKGLEWVSGISWNSGTIGYADSVKGRFTNSRDNAKNSLYLEMNSLRAEDTALYYCAKDSPPGYCSSASCYGAFDIRGQGTMVTVSS

SEQ ID NO: 1102 - protein, 11 aa, synthetic construct
RGQGTMVTVSS

SEQ ID NO: 1103 - protein, 107 aa, synthetic construct
DVVMTQSPGTLSLSPGERATLSCRASQSVSSSYLAWYQQKPGQAPRLLIYGASSRATGIPDRFSGSGSGTDFTLTISRLEPEDFAVYYCQQDSLGLTFGGGTKLEIK

SEQ ID NO: 1104 - skipped

SEQ ID NO: 1105 - protein, 16 aa, synthetic construct
  VARIANT 9: note = X is A or G
ARHGRGYDXYDGAFDI

SEQ ID NO: 1106 - protein, 11 aa, synthetic construct
ARDYYGGLFDY

SEQ ID NO: 1107 - protein, 15 aa, synthetic construct
  VARIANT 6: note = X is D or N
  VARIANT 7: note = X is G or Y
  VARIANT 8: note = X is E or S
  VARIANT 10: note = X is S, T, or W
ARESWXXXGXYYMDV

SEQ ID NO: 1108 - protein, 20 aa, synthetic construct
  VARIANT 4: note = X is S, T, or W
  VARIANT 6: note = X is L, P, or S
  VARIANT 8: note = X is F or Y
  VARIANT 10: note = X is A or S
  VARIANT 11: note = X is S or T
  VARIANT 12: note = X is A or T
  VARIANT 13: note = X is S or Y
AKDXPXGXCXXXXCYGAFDI

SEQ ID NO: 1109 - protein, 6 aa, synthetic construct
  VARIANT 3: note = X is G or S
  VARIANT 6: note = X is A or Y
QSXSSX

SEQ ID NO: 1110 - protein, 7 aa, synthetic construct
QSVSSSY

SEQ ID NO: 1111 - protein, 9 aa, synthetic construct
  VARIANT 3: note = X is F, L, S, T, or Y
  VARIANT 4: note = X is G, N, S, or Y
  VARIANT 5: note = X is S or F
  VARIANT 6: note = X is S, T, W, or Y
  VARIANT 8: note = X is F, I, L, or Y
QQXXXXPXT

SEQ ID NO: 1112 - protein, 8 aa, synthetic construct
  VARIANT 3: note = X is D, S, or Y
  VARIANT 4: note = X is E, G, or S
  VARIANT 5: note = X is L or T
  VARIANT 6: note = X is C, G, or S
QQXXXXLT

SEQ ID NO: 1113 - protein, 9 aa, synthetic construct
IGTISSYIY

SEQ ID NO: 1114 - protein, 9 aa, synthetic construct
INWNGGSTG

SEQ ID NO: 1115 - protein, 9 aa, synthetic construct
ISWNSGSIG

SEQ ID NO: 1116 - protein, 37 aa, synthetic construct
YADSVKGRFTISRDNAKNSLYLQMNSLRAEDTALYYC

SEQ ID NO: 1117 - protein, 37 aa, synthetic construct
YADSVKGRFTISRDNAKNSLHLQMNSLRAEDTALYYC

SEQ ID NO: 1118 - protein, 448 aa, synthetic construct; identical to SEQ ID NO: 404

SEQ ID NO: 1119 - protein, 110 aa, synthetic construct
EIVMTQSPSSLSASVGDRVTITCRASQSISSYLNWYQQKPGKAPKLLIYAASSLQSGVPSRFSGSGSGTDFTLTISSLQPEDFATYYCQQSYSTPLTFGGGTKVDIKRTV

SEQ ID NO: 1120 - protein, 127 aa, synthetic construct
EVQLVESGGGLVQPGRSLRLSCAASGFTFDDYAMHWVRQAPGKGLEWVSGISWNSGTIGYADSVKGRFTNSRDNAKNSLYLEMNSLRAEDTALYYCAKDSPPGYCSSASCYGAFDIWGQGTMVTVSS

SEQ ID NO: 1121 - protein, 110 aa, synthetic construct
DVVMTQSPGTLSLSPGERATLSCRASQSVSSSYLAWYQQKPGQAPRLLIYGASSRATGIPDRFSGSGSGTDFTLTISRLEPEDFAVYYCQQYGTSLTFGGGTKLEIKRTV

SEQ ID NO: 1122 - protein, 123 aa, synthetic construct
QVQLVQSGAAVKKPGESLKISCKGSGYRFTSYWIGWVRQMPGKGLEWMGIIYPGDSDTRYSPSFQGQVTISAGKSISTAYLQWSSLKASDTAMYYCARHGRGYDGYDGAFDIWGQGTMVTVSS

SEQ ID NO: 1123 - protein, 110 aa, synthetic construct
AIQLTQSPSSLSASVGDRVTITCRASQGISSALAWYQQKPGKAPKLLIYDASSLESGVPSRFSGSGSGTDFTLTISSLQPEDFATYYCQQFSSYPLTFGGGTKVEIKRTV

SEQ ID NO: 1124 - protein, 123 aa, synthetic construct
QVQLVQSGAAVKKPGESLKISCKGSGYRFTSYWIGWVRQMPGKGLEWMGIIYPGDSDTRYSPSFQGQVTISAGKSISTAYLQWSSLKASDTAMYYCARHGRGYDAYDGAFDIWGQGTMVTVSS

SEQ ID NO: 1125 - protein, 110 aa, synthetic construct
AIQLTQSPSSLSASVGDRVTITCRASQGISSALAWYQQKPGKAPKLLIYDASSLESGVPSRFSGSGSGTDFTLTISSLQPEDFATYYCQQTNSYPLTFGGGTKVEIKRTV

SEQ ID NO: 1126 - protein, 127 aa, synthetic construct
EVQLVESGGGLVQPGRSLRLSCAASGFTFDDYAMHWVRQAPGKGLEWVSGISWNSGSIGYADSVKGRFTISRDNAKNSLYLQMNSLRAEDTALYYCAKDTPLGYCSTTSCYGAFDIWGQGTMVTVSS

SEQ ID NO: 1127 - protein, 111 aa, synthetic construct
EIVLAQSPGTLSLSPGERATLSCRASQSVSSSYLAWYQQKPGQAPRLLIYGASSRATGIPDRFSGSGSGTDFTLTISRLEPEDFAVYYCQQYGSSPLTFGGGTKLEIKRTV

SEQ ID NO: 1128 - protein, 127 aa, synthetic construct
EVQLVESGGGLVQPGRSLRLSCSASGFTFDDYAMHWVRQAPGKGLEWVSGISWNSGTIGYADSVKGRFTISRDNAKNSLYLQMNSLRAEDTALYYCAKDSPPGYCSSASCYGAFDIWGQGTTVTVSS

SEQ ID NO: 1129 - protein, 110 aa, synthetic construct
DIQLTQSPSSLSASVGDRVTITCRASQSISSYLNWYQQKPGKAPKLLIYAASSLQSGVPSRFSGSGSGTDFTLTINSLQPEDFATYYCQQSYSTPFTFGPGTKVEIKRTV

SEQ ID NO: 1130 - protein, 122 aa, synthetic construct
EVQLVESGGGVVRPGGSLRLSCAASGFTFDDYGMSWVRQAPGKGLEWVSDINWNGGSTGYADSVKGRFTISRDNAKNSLYLQMNSLRAEDTALYYCARESWDGSGIYYMDVWGKGTTVTVSS

SEQ ID NO: 1131 - protein, 110 aa, synthetic construct
DIVMTQSPSFLSASVGDRVTITCRASQGISSYLNWYQQKPGKAPKLLIYAASTLQNGVPSRFSGSGSGTDFTLTISSLQPEDFATYYCQQSYSTPITFGQGTRLEIKRTV

SEQ ID NO: 1132 - protein, 122 aa, synthetic construct
EVQLVESGGGVVRPGGSLRLSCAASGFTFDDYGMSWVRQAPGKGLEWVSGINWNGGSTGYADSVKGRFTISRDNAKNSLHLQMNSLRAEDTALYYCARESWNYEGYYYMDVWGKGTTVTVSS

SEQ ID NO: 1133 - protein, 110 aa, synthetic construct
AIQMTQSPSFLSASVGDRVTITCRASQGISSYLAWYQQKPGKAPKLLIYAASTLQNGVPSRFSGSGSGTEFTLTISSLQPEDFATYYCQQLNSYPYTFGQGTKLEIKRTV

SEQ ID NO: 1134 - protein, 976 aa, synthetic construct
MRGARGAWDFLCVLLLLLRVQTGSSQPSVSPGEPSPPSIHPGKSDLIVRVGDEIRLLCTDPGFVKWTFEILDETNENKQNEWITEKAEATNTGKYTCTNKHGLSNSIYVFVRDPAKLFLVDRSLYGKEDNDTLVRCPLTDPEVTNYSLKGCQGKPLPKDLRFIPDPKAGIMIKSVKRAYHRLCLHCSVDQEGKSVLSEKFILKVRPAFKAVPVVSVSKASYLLREGEEFTVTCTIKDVSSSVYSTWKRENSQTKLQEKYDGWHHGDFNYERQATLTISSARVNDSGVFMCYANNTFGSANVTTTLEVVDKGFINIFPMINTTVFVNDGENVDLIVEYEAFPKPEHQQWIYMNRTFTDKWEDYPKSENESNIRYVSELHLTRLKGTEGGTYTFLVSNSDVNAAIAFNVYVNTKPEILTYDRLVNGMLQCVAAGFPEPTIDWYFCPGTEQRCSASVLPVDVQTLNSSGPPFGKLVVQSSIDSSAFKHNGTVECKAYNDVGKTSAYFNFAFKGNNKEQIHPHTLFTPLLIGFVIVAGMMCIIVMILTYKYLQKPMYEVQWKVVEEINGNNYVYIDPTQLPYDHKWEFPRNRLSFGKTLGAGAFGKVVEATAYGLIKSDAAMTVAVKMLKPSAHLTEREALMSELKVLSYLGNHMNIVNLLGACTIGGPTLVITEYCCYGDLLNFLRRKRDSFICSKQEDHAEAALYKNLLHSKESSCSDSTNEYMDMKPGVSYVVPTKADKRRSVRIGSYIERDVTPAIMEDDELALDLEDLLSFSYQVAKGMAFLASKNCIHRDLAARNILLTHGRITKICDFGLARDIKNDSNYVVKGNARLPVKWMAPESIFNCVYTFESDVWSYGIFLWELFSLGSSPYPGMPVDSKFYKMIKEGFRMLSPEHAPAEMYDIMKTCWDADPLKRPTFKQIVQLIEKQISESTNHIYSNLANCSPNRQKPVVDHSVRINSVGSTASSSQPLLVHDDV

SEQ ID NO: 1135 - protein, 976 aa, synthetic construct
MRGARGAWDFLCVLLLLLRVQTGSSQPSVSPGEPSPPSIHPGKSDLIVRVGDEIRLLCTDPGFVKWTFEILDETNENKQNEWITEKAEATNTGKYTCTNKHGLSNSIYVFVRDPAKLFLVDRSLYGKEDNDTLVRCPLTDPEVTNYSLKGCQGKPLPKDLRFIPDPKAGIMIKSVKRAYHRLCLHCSVDQEGKSVLSEKFILKVRPAFKAVPVVSVSKASYLLREGEEFTVTCTIKDVSSSVYSTWKRENSQTKLQEKYNGWHHGDFNYERQATLTISSARVNDSGVFMCYANNTFGSANVTTTLEVVDKGFINIFPMINTTVFVNDGENVDLIVEYEAFPKPEHQQWIYMNRTFTDKWEDYPKSENESNIRYVSELHLTRLKGTEGGTYTFLVSNSDVNAAIAFNVYVNTKPEILTYDRLVNGMLQCVAAGFPEPTIDWYFCPGTEQRCSASVLPVDVQTLNSSGPPFGKLVVQSSIDSSAFKHNGTVECKAYNDVGKTSAYFNFAFKGNNKEQIHPHTLFTPLLIGFVIVAGMMCIIVMILTYKYLQKPMYEVQWKVVEEINGNNYVYIDPTQLPYDHKWEFPRNRLSFGKTLGAGAFGKVVEATAYGLIKSDAAMTVAVKMLKPSAHLTEREALMSELKVLSYLGNHMNIVNLLGACTIGGPTLVITEYCCYGDLLNFLRRKRDSFICSKQEDHAEAALYKNLLHSKESSCSDSTNEYMDMKPGVSYVVPTKADKRRSVRIGSYIERDVTPAIMEDDELALDLEDLLSFSYQVAKGMAFLASKNCIHRDLAARNILLTHGRITKICDFGLARDIKNDSNYVVKGNARLPVKWMAPESIFNCVYTFESDVWSYGIFLWELFSLGSSPYPGMPVDSKFYKMIKEGFRMLSPEHAPAEMYDIMKTCWDADPLKRPTFKQIVQLIEKQISESTNHIYSNLANCSPNRQKPVVDHSVRINSVGSTASSSQPLLVHDDV

SEQ ID NO: 1136 - protein, 976 aa, synthetic construct
MRGARGAWDFLCVLLLLLRVQTGSSQPSVSPGEPSPPSIHPGKSDLIVRVGDEIRLLCTDPGFVKWTFEILDETNENKQNEWITEKAEATNTGKYTCTNKHGLSNSIYVFVRDPAKLFLVDRSLYGKEDNDTLVRCPLTDPEVTNYSLKGCQGKPLPKDLRFIPDPKAGIMIKSVKRAYHRLCLHCSVDQEGKSVLSEKFILKVRPAFKAVPVVSVSKASYLLREGEEFTVTCTIKDVSSSVYSTWKRENSQTKLQEKCDSWHHGDFNYERQATLTISSARVNDSGVFMCYANNTFGSANVTTTLEVVDKGFINIFPMINTTVFVNDGENVDLIVEYEAFPKPEHQQWIYMNRTFTDKWEDYPKSENESNIRYVSELHLTRLKGTEGGTYTFLVSNSDVNAAIAFNVYVNTKPEILTYDRLVNGMLQCVAAGFPEPTIDWYFCPGTEQRCSASVLPVDVQTLNSSGPPFGKLVVQSSIDSSAFKHNGTVECKAYNDVGKTSAYFNFAFKGNNKEQIHPHTLFTPLLIGFVIVAGMMCIIVMILTYKYLQKPMYEVQWKVVEEINGNNYVYIDPTQLPYDHKWEFPRNRLSFGKTLGAGAFGKVVEATAYGLIKSDAAMTVAVKMLKPSAHLTEREALMSELKVLSYLGNHMNIVNLLGACTIGGPTLVITEYCCYGDLLNFLRRKRDSFICSKQEDHAEAALYKNLLHSKESSCSDSTNEYMDMKPGVSYVVPTKADKRRSVRIGSYIERDVTPAIMEDDELALDLEDLLSFSYQVAKGMAFLASKNCIHRDLAARNILLTHGRITKICDFGLARDIKNDSNYVVKGNARLPVKWMAPESIFNCVYTFESDVWSYGIFLWELFSLGSSPYPGMPVDSKFYKMIKEGFRMLSPEHAPAEMYDIMKTCWDADPLKRPTFKQIVQLIEKQISESTNHIYSNLANCSPNRQKPVVDHSVRINSVGSTASSSQPLLVHDDV

SEQ ID NO: 1137 - protein, 976 aa, synthetic construct
MRGARGAWDFLCVLLLLLRVQTGSSQPSVSPGEPSPPSIHPGKSDLIVRVGDEIRLLCTDPGFVKWTFEILDETNENKQNEWITEKAEATNTGKYTCTNKHGLSNSIYVFVRDPAKLFLVDRSLYGKEDNDTLVRCPLTDPEVTNYSLKGCQGKPLPKDLRFIPDPKAGIMIKSVKRAYHRLCLHCSVDQEGKSVLSEKFILKVRPAFKAVPVVSVSKASYLLREGEEFTVTCTIKDVSSSVYSTWKRENSQTKLQEKYDSWHHGDFNYERQATLTISSARVNDSGVFMCYANNTFGSANVTTTLEVVDKGFINIFPMINTTVFVNDGENVDLIVEYEAFPKPEHQQWIYMNRTFTDKWEDYPKSENESNIRYVSELHLTRLKGTEGGTYTFLVSNSDVNAAIAFNVYVNTKPEILTYDRLVNGMLQCVAAGFPEPTIDWYFCPGTEQRCSASVLPVDVQTLNSSGPPFGKLVVQSSIDSSAFKHNGTVECKAYNDVGKTSAYFNFAFKGNNKEQIHPHTLFTPLLIGFVIVAGMMCIIVMILTYKYLQKPMYEVQWKVVEEINGNNYVYIDPTQLPYDHKWEFPRNRLSFGKTLGAGAFGKVVEATAYGLIKSDAAMTVAVKMLKPSAHLTEREALMSELKVLSYLGNHMNIVNLLGACTIGGPTLVITEYCCYGDLLNFLRRKRDSFICSKQEDHAEAALYKNLLHSKESSCSDSTNEYMDMKPGVSYVVPTKADKRRSVRIGSYIERDVTPAIMEDDELALDLEDLLSFSYQVAKGMAFLASKNCIHRDLAARNILLTHGRITKICDFGLARDIKNDSNYVVKGNARLPVKWMAPESIFNCVYTFESDVWSYGIFLWELFSLGSSPYPGMPVDSKFYKMIKEGFRMLSPEHAPAEMYDIMKTCWDADPLKRPTFKQIVQLIEKQISESTNHIYSNLANCSPNRQKPVVDHSVRINSVGSTASSSQPLLVHDDV

SEQ ID NO: 1138 - protein, 976 aa, synthetic construct
MRGARGAWDFLCVLLLLLRVQTGSSQPSVSPGEPSPPSIHPGKSDLIVRVGDEIRLLCTDPGFVKWTFEILDETNENKQNEWITEKAEATNTGKYTCTNKHGLSNSIYVFVRDPAKLFLVDRSLYGKEDNDTLVRCPLTDPEVTNYSLKGCQGKPLPKDLRFIPDPKAGIMIKSVKRAYHRLCLHCSVDQEGKSVLSEKFILKVRPAFKAVPVVSVSKASYLLREGEEFTVTCTIKDVSSSVYSTWKRENGQTKLQEKYNSWHHGDFNYERQATLTISSARVNDSGVFMCYANNTFGSANVTTTLEVVDKGFINIFPMINTTVFVNDGENVDLIVEYEAFPKPEHQQWIYMNRTFTDKWEDYPKSENESNIRYVSELHLTRLKGTEGGTYTFLVSNSDVNAAIAFNVYVNTKPEILTYDRLVNGMLQCVAAGFPEPTIDWYFCPGTEQRCSASVLPVDVQTLNSSGPPFGKLVVQSSIDSSAFKHNGTVECKAYNDVGKTSAYFNFAFKGNNKEQIHPHTLFTPLLIGFVIVAGMMCIIVMILTYKYLQKPMYEVQWKVVEEINGNNYVYIDPTQLPYDHKWEFPRNRLSFGKTLGAGAFGKVVEATAYGLIKSDAAMTVAVKMLKPSAHLTEREALMSELKVLSYLGNHMNIVNLLGACTIGGPTLVITEYCCYGDLLNFLRRKRDSFICSKQEDHAEAALYKNLLHSKESSCSDSTNEYMDMKPGVSYVVPTKADKRRSVRIGSYIERDVTPAIMEDDELALDLEDLLSFSYQVAKGMAFLASKNCIHRDLAARNILLTHGRITKICDFGLARDIKNDSNYVVKGNARLPVKWMAPESIFNCVYTFESDVWSYGIFLWELFSLGSSPYPGMPVDSKFYKMIKEGFRMLSPEHAPAEMYDIMKTCWDADPLKRPTFKQIVQLIEKQISESTNHIYSNLANCSPNRQKPVVDHSVRINSVGSTASSSQPLLVHDDV
